(19) United States
(12) Patent Application Publication
(10) Pub. No.: US 2021/0179709 A1
(43) Pub. Date: Jun. 17, 2021

(54) ANTI-CAR COMPOSITIONS AND METHODS

(71) Applicants: Novartis AG, Basel (CH); The Trustees of the University of Pennsylvania, Philadelphia, PA (US)

(72) Inventors: Saar Gill, Philadelphia, PA (US); Marco RUELLA, Ardmore, PA (US)

(21) Appl. No.: 16/759,898

(22) PCT Filed: Oct. 31, 2018
(86) PCT No.: PCT/US2018/058514

§ 371 Date: Apr. 28, 2020

Related U.S. Application Data
(60) Provisional application No. 62/579,815, filed on Oct. 31, 2017.

(51) Int. Cl. C07K 16/28; C07K 16/42

(52) U.S. Cl. CPC C07K 16/2803; A61K 2039/505; C07K 16/4208

(57) ABSTRACT

The invention provides compositions and methods for treating conditions or diseases associated with expression of a target chimeric antigen receptor (CAR) as described herein. The invention also relates to an anti-target CAR specific to the target CAR as described herein, vectors encoding the same, and recombinant T cells comprising the anti-target CARs of the present invention. The invention also includes methods of administering a genetically modified T cell expressing an anti-target CAR as described herein.

[0001] This application claims priority to U.S. Ser. No. 62/579,815, filed on Oct. 31, 2017, the entire contents of which are incorporated by reference herein.

### FIELD OF THE INVENTION

[0002] The present invention relates generally to the use of immune effector cells (e.g., T cells, NK cells) engineered to express a Chimeric Antigen Receptor (CAR) to treat a disease associated with expression of a tumor antigen.

### BACKGROUND OF THE INVENTION

[0003] Adoptive cell transfer (ACT) therapy with autologous T-cells, especially with T-cells transduced with Chimeric Antigen Receptors (CARs), has shown promise in hematologic cancer trials.

### SUMMARY OF THE INVENTION

[0004] The present invention pertains, at least in part, to the use of immune effector cells (e.g., T cells or NK cells) engineered to express an anti-target CAR polypeptide that binds to a target CAR, as described herein, to treat cancer associated with expression of said target CAR. For instance, to treat a patient having cancer cells that express a target CAR, an anti-target CAR can be administered to specifically kill the cancer cells that express the target CAR.

[0005] In certain aspects, the present disclosure provides an isolated nucleic acid molecule encoding an anti-target CAR (chimeric antigen receptor) polypeptide, wherein the encoded anti-target CAR polypeptide comprises:

[0006] a) a ligand, e.g., an extracellular ligand, that binds to a target CAR polypeptide,

[0007] b) a transmembrane domain, and

[0008] c) an intracellular signaling domain comprising a stimulatory domain.

[0009] The present disclosure also provides an isolated anti-target CAR (chimeric antigen receptor) polypeptide, which comprises:

[0010] a) a ligand, e.g., an extracellular ligand, that binds to a target CAR polypeptide,

[0011] b) a transmembrane domain, and

[0012] c) an intracellular signaling domain comprising a stimulatory domain.

[0013] The present disclosure also provides a vector comprising a nucleic acid molecule encoding an anti-target CAR described herein.

[0014] The present disclosure also provides a cell comprising a nucleic acid described herein or a vector described herein. The present disclosure also provides a cell comprising an anti-target CAR polypeptide described herein. The present disclosure also provides a cell engineered to express an anti-target CAR polypeptide described.

[0015] The present disclosure also provides a method of making a cell comprising transducing a cell, e.g., an immune effector cell, e.g., T cell, with a nucleic acid described herein or a vector described herein.

[0016] The present disclosure also provides a method of generating a population of RNA-engineered cells comprising introducing an in vitro transcribed RNA or synthetic RNA into a cell, where the RNA comprises a nucleic acid encoding an anti-target CAR polypeptide described herein or a vector described herein.

[0017] In an aspect, disclosed herein is a method of treating, a subject having, or at risk of having, an unwanted effect (e.g., a disease or condition) associated with expression of a target CAR, comprising administering to the subject an effective number of cells comprising an anti-target CAR polypeptide described herein.

[0018] In some embodiments, the unwanted effect associated with expression of a target CAR comprises one or more of: B cell aplasia (e.g., lower number of B cells or no B cells); cytokine release syndrome (CRS); or a neurologic toxicity.

[0019] In some embodiments, the unwanted effect associated with expression of a target CAR is B cell aplasia. In some embodiments, administration of the anti-target CAR results in amelioration of unwanted effects associated with expression of a target CAR, e.g., reduction of B cell aplasia.

[0020] The present disclosure also provides, in some aspects, a method of treating a subject, e.g., mammal, having a disease or condition associated with expression of a target CAR (e.g., a disease in which a target CAR is expressed) comprising administering to the mammal an effective number of cells comprising an anti-target CAR polypeptide described herein. Similarly, in some aspects, the disclosure provides the use of a plurality of cells comprising an anti-target CAR polypeptide described herein in the manufacture of a medicament for treating a disease, e.g., a disease or condition associated with expression of a target CAR. In related aspects, the disclosure provides a plurality of cells comprising an anti-target CAR polypeptide described herein, for use in treating a disease or condition, e.g., a disease or condition associated with expression of a target CAR.

[0021] The present disclosure also provides, in some aspects, a method of reducing the number of target CAR-expressing cells present in a subject, e.g., mammal, e.g., in the circulation of the subject, comprising administering to the subject an effective number of cells described herein, or an effective number of cells comprising a nucleic acid described herein, a vector described herein, or an anti-target CAR polypeptide described herein.

[0022] In some embodiments, the ligand comprises a cognate antigen molecule or an antibody molecule that binds to the target CAR polypeptide. In some embodiments, the ligand comprises an antibody molecule (e.g., an anti-idiotypic antibody molecule) that binds to the target CAR polypeptide, e.g., binds an extracellular domain of the target CAR polypeptide. In some embodiments, the ligand binds an antigen binding domain in the target CAR polypeptide, a hinge domain in the target CAR polypeptide, or a junction between an antigen binding domain and a hinge domain in the target CAR polypeptide. In some embodiments, the ligand comprises a cognate antigen molecule that binds the target CAR polypeptide. In some embodiments, the ligand is extracellular. In some embodiments, the anti-target CAR comprises a ligand that binds to a target CAR, a transmembrane domain, and an intracellular signaling domain, e.g., comprising a primary signaling domain and/or a costimulatory signaling domain.

[0023] In some embodiments, the target CAR polypeptide is a CD19CAR polypeptide and the ligand comprises an anti-idiotypic antibody that binds said CD19CAR polypeptide. In some embodiments, the target CAR polypeptide is a CD19CAR polypeptide and the ligand binds said CD19CAR polypeptide, e.g., the ligand comprises CD19 or a fragment thereof that binds said CD19CAR polypeptide.

[0024] In some embodiments:

[0025] (i) the target CAR polypeptide is a CD33CAR polypeptide and the ligand binds said CD33 CAR polypeptide, e.g., the ligand comprises CD33 or a fragment thereof that binds said CD33CAR polypeptide, or the ligand comprises an antibody molecule that binds said CD33CAR polypeptide;

[0026] (ii) the target CAR polypeptide is an EGFRvIIICAR polypeptide, and the ligand binds said EGFRvIIICAR polypeptide, e.g., the ligand comprises EGFRvIII or a fragment thereof that binds said EGFRvIIICAR polypeptide, or the ligand comprises an antibody molecule that binds said EGFRvIIICAR polypeptide;

[0027] (iii) the target CAR polypeptide is a mesothelinCAR polypeptide, and the ligand binds said mesothelin CAR polypeptide, e.g., the ligand comprises mesothelin or a fragment thereof that binds said mesothelinCAR polypeptide, or the ligand comprises an antibody molecule that binds said mesothelinCAR polypeptide;

[0028] (iv) the target CAR polypeptide is a BCMACAR polypeptide, and the ligand binds said BCMACAR polypeptide, e.g., the ligand comprises BCMA or a fragment thereof that binds said BCMACAR polypeptide, or the ligand comprises an antibody molecule that binds said BCMACAR polypeptide;

[0029] (v) the target CAR polypeptide is a CD20CAR polypeptide, and the ligand binds said CD20CAR polypeptide, e.g., the ligand comprises CD20 or a fragment thereof that binds said CD20CAR polypeptide, or the ligand comprises an antibody molecule that binds said CD20CAR polypeptide;

[0030] (vi) the target CAR polypeptide is a CD22CAR polypeptide, and the ligand binds said CD22CAR polypeptide, e.g., the ligand comprises CD22 or a fragment thereof that binds said CD22CAR polypeptide, or the ligand comprises an antibody molecule that binds said CD22CAR polypeptide;

[0031] (vii) the target CAR polypeptide is a CD123CAR polypeptide, and the ligand binds said CD123CAR polypeptide, e.g., the ligand comprises CD123 or a fragment thereof that binds said CD123CAR polypeptide, or the ligand comprises an antibody molecule that binds said CD123CAR polypeptide; or

[0032] (viii) the target CAR polypeptide is a CLL-1CAR polypeptide, and the ligand binds said CLL-1CAR polypeptide, e.g., the ligand comprises CLL-1 or a fragment thereof that binds said CLL-1CAR polypeptide, or the ligand comprises an antibody molecule that binds said CLL-1CAR polypeptide.

[0033] In some embodiments, the target CAR polypeptide comprises i) an antigen binding domain, e.g., an antigen binding domain that binds a tumor antigen described herein, e.g., an anti-CD19 binding domain, ii) a transmembrane domain, and iii) an intracellular signaling domain.

[0034] In some embodiments of the methods and uses described herein, the disease or condition associated with expression of a target CAR is a cancer, e.g., a cancer described herein. In some embodiments, the subject having a disease or condition associated with expression of a target CAR comprises a cell, e.g., comprises a population of cells, expressing the target CAR. In some embodiments, the cell is a cell from a cancer, e.g., a hematological cancer, e.g., a B cell cancer (e.g., ALL), a T cell cancer, or a myeloid leukemia (e.g., AML). In some embodiments, the disease associated with expression of a target CAR is a B-cell aplasia.

[0035] In some embodiments of the methods and uses described herein, the disease or condition associated with expression of a target CAR is a cancer, e.g., a cancer described herein. In some embodiments, the subject having a disease or condition associated with expression of a target CAR comprises a cell, e.g., comprises a population of cells, expressing the target CAR. In some embodiments, the cell, e.g., the target CAR-expressing cell, is a normal cell, e.g., a non-malignant cell, e.g., a normal or non-malignant hematopoietic cell, e.g., B cell, a myeloid cell, or an immune effector cell, e.g., a T cell, or an NK cell.

[0036] In some embodiments, the target CAR-expressing cell is a cancer cell, e.g., a cell from a cancer described herein.

[0037] In some embodiments, the subject has a cancer, e.g., a cancer described herein, or B-cell aplasia.

[0038] In some embodiments of the methods and uses described herein, the anti-target CAR cells are administered to the subject in about the same amount or an amount greater than the number of target CAR cells, e.g., in the subject. In some embodiments, the number of target CAR cells is estimated based on, e.g., the number of target CAR cells present in the subject e.g., at least 1 week, 2 weeks, 3 weeks, 4 weeks or more post-administration of the CAR-expressing cell therapy. In some embodiments, the number of target CAR cells is estimated based on, e.g., the number of target CAR cells present in a sample from the subject, e.g., an apheresis sample (e.g., prior to anti-target CAR transduction). In some embodiments, the number of target CAR cells is estimated based on, e.g., the number of target CAR cells that were administered to the subject, e.g., number of target CAR cells that were initially administered to the subject. In some embodiments, the anti-target CAR cells are administered at a ratio of at least 1:1, e.g., at least 2:1, 3:1, 4:1, 5:1, 6:1, 7:1, 8:1, 9:1, 10:1, 15:1, 20:1, 50:1, 100:1 or 1000:1, with the target CAR cells. In some embodiments, the number of anti-target CAR cells that are administered to the subject are at least 1.5 fold, e.g., at least 1.5-100 fold, e.g., 1.5-5, 5-10, 10-15, 15-25, 25-35, 35-45, 45-55, 55-65, 65-75, 75-85, 85-95, or 95-100 fold, more than the number of target CAR cells in the subject

[0039] In some embodiments, any of the methods and uses described herein comprises evaluating, e.g., estimating, the number of target CAR cells in the subject, e.g., at least 1 week, 2 weeks, 3 weeks, 4 weeks or more post-administration of the CAR-expressing cell therapy. In some embodiments, the evaluating step comprises acquiring a sample, e.g., a blood sample, e.g., plasma sample, from the subject and determining:
[0040] (i) the number of target CAR cells present in the blood sample; and/or
[0041] (ii) the number of target CAR cells present in the subject, e.g., in the circulation of the subject.

[0042] In some embodiments, based on the determination of the number of target CAR cells, the method comprises administering the same or greater amount of anti-target CAR cells to the subject. In some embodiments, the subject is administered the same or greater amount, e.g., at least 1.5 fold, e.g., at least 1.5-100 fold, e.g., 1.5-5, 5-10, 10-15, 15-25, 25-35, 35-45, 45-55, 55-65, 65-75, 75-85, 85-95, or 95-100 fold, more anti-target CAR cells compared to the number of target CAR cells determined in (ii).

[0043] In some embodiments, any of the methods and uses described herein comprises evaluating, e.g., estimating, the number of anti-target CAR cells in the subject, e.g., at least 1 week, 2 weeks, 3 weeks, 4 weeks or more post-administration of the anti-target CAR-expressing cell therapy. In some embodiments, the evaluating step comprises acquiring a sample, e.g., a blood sample, e.g., plasma sample, from the subject and determining:
[0044] (iii) the number of anti-target CAR cells present in the blood sample; and/or
[0045] (iv) the number of anti-target CAR cells present in the subject, e.g., in the circulation of the subject.

[0046] In some embodiments of the methods or uses described herein, the subject is a mammal, e.g., a human.

[0047] In some embodiments, the subject was previously administered target CAR-expressing cells. In some embodiments, the subject experienced relapse, e.g., relapse characterized by cancer cells that are negative for the tumor antigen bound by the target CAR. In some embodiments, the subject had or has a disease associated with expression of CD19 and the relapse is a CD19-negative relapse, e.g., wherein some or all of the cancer cells in the subject are CD19-negative.

[0048] In some embodiments, the subject had:

[0049] (i) a disease associated with expression of CD33, and the relapse is a CD33-negative relapse;

[0050] (ii) a disease associated with expression of EGFRvIII, and the relapse is a EGFRvIII-negative relapse;

[0051] (iii) a disease associated with expression of mesothelin, and the relapse is a mesothelin-negative relapse;

[0052] (iv) a disease associated with expression of BCMA, and the relapse is a BCMA-negative relapse;

[0053] (v) a disease associated with expression of CD20, and the relapse is a CD20-negative relapse;

[0054] (vi) a disease associated with expression of CD22, and the relapse is a CD22-negative relapse;

[0055] (vi) a disease associated with expression of CD123, and the relapse is a CD123-negative relapse; or

[0056] (vii) a disease associated with expression of CLL-1, and the relapse is a CLL-1-negative relapse.

### Anti-Target CAR-Encoding Nucleic Acids

[0057] In some aspects, the disclosure provides an isolated nucleic acid molecule encoding an anti-target CAR molecule. In one embodiment, the anti-target CAR comprises: i) a ligand that binds to a target CAR, ii) a transmembrane domain, and iii) an intracellular signaling domain, e.g., comprising a primary signaling domain and/or a costimulatory domain.

[0058] In some embodiments, the ligand of the isolated nucleic acid molecule encoding the anti-target CAR polypeptide molecule comprises a cognate antigen molecule or an antibody molecule that binds to the target CAR. In some embodiments, the ligand comprises an antibody molecule that binds to the target CAR, e.g., an anti-idiotypic antibody molecule that binds the target CAR, e.g., an anti-idiotype antibody molecule described herein.

[0059] In one embodiment, the isolated nucleic acid molecule comprises a sequence encoding a costimulatory domain, e.g., a costimulatory domain described herein. In embodiments, the intracellular signaling domain comprises a costimulatory domain. In embodiments, the intracellular signaling domain comprises a primary signaling domain. In embodiments, the intracellular signaling domain comprises a costimulatory domain and a primary signaling domain.

[0060] In some embodiments, the isolated nucleic acid molecule comprises a primary signaling domain. In certain embodiments, the encoded primary signaling domain comprises a functional signaling domain of a protein selected from the group consisting of CD3 zeta, CD3 gamma, CD3 delta, CD3 epsilon, common FcR gamma (FCER1G), FcR beta (Fc Epsilon Rib), CD79a, CD79b, Fcgamma RIIa, DAP10, and DAP12.

[0061] In one embodiment, the isolated nucleic acid encodes a primary signaling domain comprising a functional signaling domain of CD3 zeta. The encoded CD3 zeta primary signaling domain can comprise an amino acid sequence having at least one, two or three modifications but not more than 20, 10 or 5 modifications of an amino acid sequence of SEQ ID NO: 18 or SEQ ID NO: 20, or a sequence with at least 95-99% identity to an amino acid sequence of SEQ ID NO:18 or SEQ ID NO: 20. In some embodiments, the encoded primary signaling domain comprises a sequence of SEQ ID NO:18 or SEQ ID NO: 20. In other embodiments, the nucleic acid sequence encoding the primary signaling domain comprises a sequence of SEQ ID NO:19 or SEQ ID NO: 21, or a sequence with at least 95-99% identity thereof.

[0062] In some embodiments, the intracellular signaling domain of the isolated nucleic acid molecule encoding the anti-target CAR polypeptide molecule comprises a costimulatory signaling domain. In some embodiments, the encoded costimulatory signaling domain comprises a functional signaling domain of a protein e.g., as described herein, e.g., selected from the group consisting of a MHC class I molecule, a TNF receptor protein, an Immunoglobulin-like protein, a cytokine receptor, an integrin, a signaling lymphocytic activation molecule (SLAM protein), an activating NK cell receptor, BTLA, a Toll ligand receptor, OX40, CD2, CD7, CD27, CD28, CD30, CD40, CDS, ICAM-1, LFA-1 (CD11a/CD18), 4-1BB (CD137), B7-H3, CDS, ICAM-1, ICOS (CD278), GITR, BAFFR, LIGHT, HVEM (LIGHTR), KIRDS2, SLAMF7, NKp80 (KLRF1), NKp44, NKp30, NKp46, CD19, CD4, CD8alpha, CD8beta, IL2R beta, IL2R gamma, IL7R alpha, ITGA4, VLA1, CD49a, ITGA4, IA4, CD49D, ITGA6, VLA-6, CD49f, ITGAD, CD11d, ITGAE, CD103, ITGAL, CD11a, LFA-1, ITGAM, CD11b, ITGAX, CD11c, ITGB1, CD29, ITGB2, CD18, LFA-1, ITGB7, NKG2D, NKG2C, TNFR2, TRANCE/RANKL, DNAM1 (CD226), SLAMF4 (CD244, 2B4), CD84, CD96 (Tactile), CEACAM1, CRTAM, Ly9 (CD229), CD160 (BY55), PSGL1, CD100 (SEMA4D), CD69, SLAMF6 (NTB-A, Ly108), SLAM (SLAMF1, CD150, IPO-3), BLAME (SLAMF8), SELPLG (CD162), LTBR, LAT, GADS, SLP-76, PAG/Cbp, CD19a, and a ligand that specifically binds with CD83.

[0063] In one embodiment, the encoded costimulatory domain of 4-1BB comprises the amino acid sequence of SEQ ID NO: 14. In one embodiment, the encoded costimulatory domain comprises an amino acid sequence having at least one, two or three modifications but not more than 20, 10 or 5 modifications of an amino acid sequence of SEQ ID NO: 14, or a sequence with at least 95-99% identiy to the amino acid sequence of SEQ ID NO: 14. In one embodiment, the nucleic acid sequence encoding the costimulatory domain comprises the nucleotide sequence of SEQ ID NO: 15, or a sequence at least 95-99% identity to SEQ ID NO: 15.

[0064] In certain embodiments, the encoded transmembrane domain comprises an amino acid sequence of a CD8 transmembrane domain having at least one, two or three modifications but not more than 20, 10 or 5 modifications of an amino acid sequence of SEQ ID NO: 12, or a sequence with at least 95-99% identity to an amino acid sequence of SEQ ID NO: 12. In some embodiments, the encoded transmembrane domain comprises a transmembrane domain of CD8, e.g., IYIWAPLAGTCGVLLLSLVITLYC (SEQ ID NO: 12). In other embodiments, the nucleic acid molecule comprises a nucleotide sequence of a CD8 transmembrane domain, e.g., comprising the sequence of SEQ ID NO: 13, or a sequence with at least 95-99% identity thereof.

[0065] In certain embodiments, the encoded ligand that binds to a target CAR is connected to the transmembrane domain by a hinge region. In one embodiment, the encoded hinge region comprises the amino acid sequence of a CD8 hinge, e.g., SEQ ID NO: 403; or the amino acid sequence of an IgG4 hinge, e.g., SEQ ID NO: 405, or a sequence with at least 95-99% identity to SEQ ID NO:403 or 405. In other embodiments, the nucleic acid sequence encoding the hinge region comprises a sequence of SEQ ID NO: 404 or SEQ ID NO: 406, corresponding to a CD8 hinge or an IgG4 hinge, respectively, or a sequence with at least 95-99% identity to SEQ ID NO:404 or 406.

[0066] In certain embodiments, the anti-target CAR comprises a leader region, wherein said leader region encodes an amino acid sequence comprising SEQ ID NO: 401, or a sequence with at least 95-99% identity thereof; or said leader region comprises the nucleotide sequence of SEQ ID NO: 402, or a nucleotide sequence with at least 95-99% identity thereof.

### Vectors

[0067] In another aspect, the invention pertains to a vector comprising a nucleic acid sequence encoding an anti-target CAR polypeptide described herein. In one embodiment, the vector is chosen from a DNA vector, an RNA vector, a plasmid, a lentivirus vector, adenoviral vector, or a retrovirus vector. In one embodiment, the vector is a lentivirus vector.

[0068] In an embodiment, the vector comprises a nucleic acid sequence that encodes an anti-target CAR, e.g., an anti-target CAR described herein, and a nucleic acid sequence that encodes an inhibitory molecule comprising: an inhKIR cytoplasmic domain; a transmembrane domain, e.g., a KIR transmembrane domain; and an inhibitor cytoplasmic domain, e.g., an ITIM domain, e.g., an inhKIR ITIM domain. In an embodiment the inhibitory molecule is a naturally occurring inhKIR, or a sequence sharing at least 50, 60, 70, 80, 85, 90, 95, or 99% homology with, or that differs by no more than 1, 2, 3, 4, 5, 6, 7, 8, 9, 10, 15, or 20 residues from, a naturally occurring inhKIR.

[0069] In an embodiment, the nucleic acid sequence that encodes an inhibitory molecule comprises: a SLAM family cytoplasmic domain; a transmembrane domain, e.g., a SLAM family transmembrane domain; and an inhibitor cytoplasmic domain, e.g., a SLAM family domain, e.g., an SLAM family ITIM domain. In an embodiment the inhibitory molecule is a naturally occurring SLAM family member, or a sequence sharing at least 50, 60, 70, 80, 85, 90, 95, or 99% homology with, or that differs by no more than 1, 2, 3, 4, 5, 6, 7, 8, 9, 10, 15, or 20 residues from, a naturally occurring SLAM family member.

[0070] In one embodiment, the vector further comprises a promoter. In some embodiments, the promoter is chosen from an EF-1 promoter, a CMV IE gene promoter, an EF-1α promoter, an ubiquitin C promoter, or a phosphoglycerate kinase (PGK) promoter. In one embodiment, the promoter is an EF-1 promoter. In one embodiment, the EF-1 promoter comprises a sequence of SEQ ID NO: 400.

[0071] In one embodiment, the vector is an in vitro transcribed vector, e.g., a vector that transcribes RNA of a nucleic acid molecule described herein. In one embodiment, the nucleic acid sequence in the vector further comprises a poly(A) tail, e.g., a poly A tail described herein, e.g., comprising about 150 adenosine bases (SEQ ID NO:33). In one embodiment, the nucleic acid sequence in the vector further comprises a 3′UTR, e.g., a 3′ UTR described herein, e.g., comprising at least one repeat of a 3′UTR derived from human beta-globulin. In one embodiment, the nucleic acid sequence in the vector further comprises promoter, e.g., a T2A promoter.

### Anti-Target CAR Polypeptides

[0072] In another aspect, the invention features an anti-target CAR molecule comprising: i) a ligand that binds to a target CAR, ii) a transmembrane domain, and iii) an intracellular domain that comprises a costimulatory domain

[0073] In some embodiments, the anti-target CAR molecule comprises a primary signaling domain. In other embodiments, the primary signaling domain of the anti-target CAR polypeptide molecule comprises a functional signaling domain of a protein selected from the group consisting of CD3 zeta, CD3 gamma, CD3 delta, CD3 epsilon, common FcR gamma (FCER1G), FcR beta (Fc Epsilon Rib), CD79a, CD79b, Fcgamma RIIa, DAP10, and DAP12.

[0074] In one embodiment, the primary signaling domain comprises a functional signaling domain of CD3 zeta. The CD3 zeta primary signaling domain can comprise an amino acid sequence having at least one, two or three modifications but not more than 20, 10 or 5 modifications of an amino acid sequence of SEQ ID NO: 18 or SEQ ID NO: 20, or a sequence with at least 95-99% identity to an amino acid sequence of SEQ ID NO:18 or SEQ ID NO: 20. In some embodiments, the primary signaling domain of the CAR polypeptide molecule comprises a sequence of SEQ ID NO:18 or SEQ ID NO: 20.

[0075] In some embodiments, the intracellular signaling domain of the anti-target CAR polypeptide molecule comprises a costimulatory signaling domain In some embodiments, the costimulatory signaling domain comprises a functional signaling domain of a protein e.g., as described herein, e.g., selected from the group consisting of a MHC class I molecule, a TNF receptor protein, an Immunoglobulin-like protein, a cytokine receptor, an integrin, a signaling lymphocytic activation molecule (SLAM protein), an activating NK cell receptor, BTLA, a Toll ligand receptor, OX40, CD2, CD7, CD27, CD28, CD30, CD40, CDS, ICAM-1, LFA-1 (CD11a/CD18), 4-1BB (CD137), B7-H3, CDS, ICAM-1, ICOS (CD278), GITR, BAFFR, LIGHT, HVEM (LIGHTR), KIRDS2, SLAMF7, NKp80 (KLRF1), NKp44, NKp30, NKp46, CD19, CD4, CD8alpha, CD8beta, IL2R beta, IL2R gamma, IL7R alpha, ITGA4, VLA1, CD49a, ITGA4, IA4, CD49D, ITGA6, VLA-6, CD49f, ITGAD, CD11d, ITGAE, CD103, ITGAL, CD11a, LFA-1, ITGAM, CD11b, ITGAX, CD11c, ITGB1, CD29, ITGB2, CD18, LFA-1, ITGB7, NKG2D, NKG2C, TNFR2, TRANCE/RANKL, DNAM1 (CD226), SLAMF4 (CD244, 2B4), CD84, CD96 (Tactile), CEACAM1, CRTAM, Ly9 (CD229), CD160 (BY55), PSGL1, CD100 (SEMA4D), CD69, SLAMF6 (NTB-A, Ly108), SLAM (SLAMF1, CD150, IPO-3), BLAME (SLAMF8), SELPLG (CD162), LTBR, LAT, GADS, SLP-76, PAG/Cbp, CD19a, and a ligand that specifically binds with CD83.

[0076] In some embodiments, the ligand comprises a cognate antigen molecule or an antibody molecule that binds to the target CAR. In some embodiments, the ligand comprises an antibody molecule that binds to the target CAR, e.g., an anti-idiotypic antibody molecule that binds the target CAR, e.g., an anti-idiotype antibody molecule described herein.

[0077] In some embodiments, the ligand of the anti-target CAR polypeptide molecule comprises an antibody, an antibody fragment, an scFv, a Fv, a Fab, a (Fab′)2, a single domain antibody (SDAB), a VH or VL domain, or a camelid VHH domain.

[0078] In some embodiments, the ligand of the anti-target CAR polypeptide molecule comprises a transmembrane domain of a protein chosen from an alpha, beta or zeta chain of a T-cell receptor, CD28, CD3 epsilon, CD45, CD4, CD5, CD8, CD9, CD16, CD22, CD33, CD37, CD64, CD80, CD86, CD134, CD137, CD154, KIRDS2, OX40, CD2, CD27, LFA-1 (CD11a, CD18), ICOS (CD278), 4-1BB (CD137), GITR, CD40, BAFFR, HVEM (LIGHTR), SLAMF7, NKp80 (KLRF1), CD160, CD19, IL2R beta, IL2R gamma, IL7R α, ITGA1, VLA1, CD49a, ITGA4, IA4, CD49D, ITGA6, VLA-6, CD49f, ITGAD, CD11d, ITGAE, CD103, ITGAL, CD11 a, LFA-1, ITGAM, CD11b, ITGAX, CD11c, ITGB1, CD29, ITGB2, CD18, LFA-1, ITGB7, TNFR2, DNAM1 (CD226), SLAMF4 (CD244, 2B4), CD84, CD96 (Tactile), CEACAM1, CRTAM, Ly9 (CD229), CD160 (BY55), PSGL1, CD100 (SEMA4D), SLAMF6 (NTB-A, Ly108), SLAM (SLAMF1, CD150, IPO-3), BLAME (SLAMF8), SELPLG (CD162), LTBR, PAG/Cbp, NKp44, NKp30, NKp46, NKG2D, and/or NKG2C.

[0079] In some embodiments, the ligand of the anti-target CAR polypeptide molecule is connected to the transmembrane domain by a hinge region. In one embodiment, the encoded hinge region comprises the amino acid sequence of a CD8 hinge, e.g., SEQ ID NO: 403, or the amino acid sequence of an IgG4 hinge, e.g., SEQ ID NO: 405, or a sequence with at least 95-99% identity thereof.

[0080] In some embodiments, the anti-target CAR polypeptide molecule further comprises a leader sequence. In one embodiment, the leader sequence comprises the sequence of SEQ ID NO: 1, or an amino acid sequence with at least 95-99% identity to SEQ ID NO 401.

### Anti-Target CAR-Expressing Cells

[0081] In another aspect, the invention pertains to a cell, e.g., an immune effector cell, (e.g., a population of cells, e.g., a population of immune effector cells) comprising a nucleic acid molecule, an anti-target CAR polypeptide molecule, or a vector as described herein.

[0082] In one embodiment, the cell is a human T cell. In one embodiment, the cell is a cell described herein, e.g., a human T cell, e.g., a human T cell described herein; or a human NK cell, e.g., a human NK cell described herein. In one embodiment, the human T cell is a CD8+ T cell. In one embodiment, the cell is a T cell and the T cell is diacylglycerol kinase (DGK) deficient. In one embodiment, the cell is a T cell and the T cell is Ikaros deficient. In one embodiment, the cell is a T cell and the T cell is both DGK and Ikaros deficient.

[0083] In an embodiment, the cell comprising a nucleic acid molecule, an anti-target CAR polypeptide molecule, or a vector as described herein is a cell that has not been previously engineered to express a target CAR, e.g., a target CAR described herein.

[0084] In another embodiment, an anti-target CAR-expressing immune effector cell described herein can further express another agent, e.g., an agent which enhances the activity of an anti-target CAR-expressing cell. For example, in one embodiment, the agent can be an agent which inhibits an inhibitory molecule. Examples of inhibitory molecules include PD-1, PD-L1, CTLA-4, TIM-3, CEACAM (e.g., CEACAM-1, CEACAM-3 and/or CEACAM-5), LAG-3, VISTA, BTLA, TIGIT, LAIR1, CD160, 2B4 and TGF beta, e.g., as described herein. In one embodiment, the agent that inhibits an inhibitory molecule comprises a first polypeptide, e.g., an inhibitory molecule, associated with a second polypeptide that provides a positive signal to the cell, e.g., an intracellular signaling domain described herein. In one embodiment, the agent comprises a first polypeptide, e.g., of an inhibitory molecule such as PD-1, PD-L1, CTLA-4, TIM-3, CEACAM (e.g., CEACAM-1, CEACAM-3 and/or CEACAM-5), LAG-3, VISTA, BTLA, TIGIT, LAIR1, CD160, 2B4 or TGF beta, or a fragment of any of these, and a second polypeptide which is an intracellular signaling domain described herein (e.g., comprising a costimulatory domain (e.g., 41BB, CD27 or CD28, e.g., as described herein) and/or a primary signaling domain (e.g., a CD3 zeta signaling domain described herein). In one embodiment, the agent comprises a first polypeptide of PD-1 or a fragment thereof, and a second polypeptide of an intracellular signaling domain described herein (e.g., a CD28, CD27, OX40 or 4-IBB signaling domain described herein and/or a CD3 zeta signaling domain described herein).

### Methods of Manufacturing CAR-Expressing Cells

[0085] In some aspects, the disclosure provides a method of making (e.g., manufacturing) a population of Chimeric Antigen Receptor (CAR)-expressing immune effector cells, comprising:

[0086] a) providing a population of cells comprising immune effector cells and cancer cells;

[0087] b) contacting the population of immune effector cells with a nucleic acid encoding a CAR polypeptide;

[0088] c) reducing the number or proportion of cancer cells in the population, wherein the reducing comprises one or more of:
[0089] i) contacting the population of cells with a reagent (e.g., antibody molecule) that binds a T cell antigen other than CD3 or CD28, e.g., binds CD4 or CD8, and collecting cells that bind the reagent;
[0090] ii) contacting the population of cells with a reagent “(e.g., antibody molecule)” that binds a tumor antigen other than CD19, e.g., binds CD20, CD22, ROR1, CD10, CD34, CD123, FLT-3, CD79b, CD179b, or CD79a and collecting cells that do not bind the reagent; or
[0091] iii) contacting the population of cells with a therapeutic that preferentially reduces the number of (e.g., kills or inhibits proliferation of) cancer cells compared to noncancerous immune effector cells, wherein the therapeutic is other than a BTK inhibitor, e.g., other than ibrutinib, e.g., wherein the therapeutic comprises an antibody molecule or an antibody drug conjugate;

[0092] thereby making an enriched population of CAR-expressing immune effector cells.

[0093] In some embodiments, (b) is performed before (c), (c) is performed before (b), or (b) and (c) are performed simultaneously.

[0094] In some embodiments, the cancer cells are hematologic cancer cells or circulating tumor cells (e.g., circulating tumor cells from a solid tumor).

[0095] In some embodiments, contacting comprises contacting the population of cells with a reagent (e.g., antibody molecule) that binds a tumor antigen other than CD19, CD30, CD38, CD123, CD20, CD14 or CD11b, e.g., comprises contacting the population of cells with a reagent (e.g., antibody molecule) that binds CD22, ROR1, CD10, CD34, FLT-3, CD79b, CD179b, or CD79a.

[0096] In some embodiments, the cancer cells comprise cancer cells that lack the antigen bound by the CAR, e.g., CD19-negative cancer cells. In some embodiments, the cancer cells that lack the antigen bound by the CAR comprise a portion of the protein that, in wild-type cells, comprises the antigen. In some embodiments, the protein comprises a truncation, deletion, or frameshift mutation that removes or mutates the antigen.

[0097] In some embodiments, the reagent (e.g., antibody molecule) of (c)(i) or (c)(ii) is bound to a solid substrate, e.g., a column or a bead, e.g., a magnetic bead or a bead suitable for optical sorting. In some embodiments, (c)(i) or (c)(ii) comprises performing MACS or FACS. In some embodiments, the therapeutic of (c)(iii) comprises an antibody molecule or an antibody drug conjugate. In some embodiments, the antibody molecule is an antiCD20 or antiCD22 antibody molecule. In some embodiments, the antibody molecule is fused to a toxin, e.g., an exotoxin A. In some embodiments, the therapeutic of (c)(iii) is bound to a solid substrate.

[0098] In some embodiments, the method further comprises determining the number or proportion of unwanted cells (e.g., cancer cells, e.g., cancer cells that lack the antigen bound by the CAR, e.g., CD19 negative cancer cells) in the population of cells. In some embodiments, the determining comprises performing a nucleic acid detection method, e.g., PCR, e.g., quantitative PCR, to determine the level or proportion of cancer cells in the sample, e.g., Acute Lymphocytic Leukemia (ALL) cells. In some embodiments, the determining comprises performing a deep sequencing method, e.g., DNA sequencing or RNA sequencing, e.g., nested PCR amplification and sequencing, e.g., sequencing of a tumor antigen (e.g., CD19) locus and optionally classifying the tumor antigen locus as having a mutation (e.g., deletion). In embodiments, the determining comprises performing one or more of extension assay (e.g., Wequenom), targeted PCR, digital PCR, and next generation sequencing (NGS). In embodiments, the determining comprises contacting cells with a reagent that detects a tumor antigen (e.g., wherein the tumor antigen is CD19 and the reagent comprises an anti-CD19 antibody). In embodiments, the determining comprises contacting cells with a reagent that detects a cancer cell, e.g., a reagent that detects highly proliferative cells, e.g., an antibody detecting Ki-67.

[0099] The present disclosure also provides, in some aspects, a method of making (e.g., manufacturing) a population of CAR (chimeric antigen receptor) expressing cells, comprising:

[0100] (a) providing a population of cells, wherein the population comprises immune effector cells;

[0101] (b) determining the number or proportion of unwanted cells (e.g., cancer cells, e.g., cancer cells that lack the antigen bound by the CAR, e.g., CD19 negative cancer cells) in the population,

[0102] (c)(i) if the number or proportion of (b) is less than a reference value, e.g., wherein the reference value is 10%, 5%, 4%, 3%, 2%, 1%, 0.1%, 0.01%, or 0.001% of the population, then contacting the population of cells with a nucleic acid, e.g., DNA or RNA, encoding a CAR, e.g., a CAR described herein and maintaining (e.g., culturing or expanding) the population of cells under conditions that allow expression of the CAR polypeptide from the nucleic acid, thereby making a population of CAR-expressing cells, or

[0103] (c)(ii) if the number or proportion of (b) is greater than the reference value, then discarding the population of cells or reducing the number or proportion of unwanted cells in the population.

[0104] The present disclosure also provides, in some aspects, a method of classifying a population of cells as more suitable or less suitable for CAR manufacturing, comprising:

[0105] (a) providing a population of cells, wherein the population comprises immune effector cells;

[0106] (b) determining the number or proportion of unwanted cells (e.g., cancer cells, e.g., cancer cells that lack the antigen bound by the CAR, e.g., CD19 negative cancer cells) in the population,

[0107] (c) if the number or proportion of (b) is greater than a reference value, then classifying the cells as less suitable (e.g., not suitable) for CAR manufacturing, or if the number or proportion of (b) is less than the reference value, then classifying the cells as more suitable for CAR manufacturing.

[0108] In some embodiments, if the cells are classified as more suitable for CAR manufacturing, the method further comprises contacting the cells with a nucleic acid, e.g., DNA or RNA, encoding a CAR, e.g., a CAR described herein. In some embodiments, the method further comprises maintaining (e.g., culturing or expanding) the cells under conditions that allow expression of the CAR polypeptide from the nucleic acid, thereby making a CAR-expressing cell. In embodiments, the method further comprises administering the CAR-expressing cell to a subject in need thereof.

[0109] In some embodiments, the cancer cells that lack the antigen bound by the CAR comprise a portion of the protein that, in wild-type cells, comprises the antigen. In some embodiments, the protein comprises a truncation, deletion, or frameshift mutation that removes or mutates the antigen. In some embodiments, the cancer cells are CD19-negative cancer cells.

[0110] In some embodiments, (b) comprises performing a nucleic acid detection method, e.g., PCR, e.g., quantitative PCR, to determine the level or proportion of cancer cells in the sample, e.g., Acute Lymphocytic Leukemia (ALL) cells. In some embodiments, (b) comprises performing a deep sequencing method, e.g., DNA sequencing or RNA sequencing, e.g., nested PCR amplification and sequencing, e.g., sequencing of a tumor antigen (e.g., CD19) locus and optionally classifying the tumor antigen locus as having a mutation (e.g., deletion). In embodiments, (b) comprises performing one or more of extension assay (e.g., Wequenom), targeted PCR, digital PCR, and next generation sequencing (NGS). In embodiments, (b) comprises contacting cells with a reagent that detects a tumor antigen (e.g., wherein the tumor antigen is CD19 and the reagent comprises an anti-CD19 antibody). In embodiments, (b) comprises contacting cells with a reagent that detects a cancer cell, e.g., a reagent that detects highly proliferative cells, e.g., an antibody detecting Ki-67.

[0111] In some embodiments, the method further comprises reducing the number or proportion of cancer cells in the population, wherein the reducing comprises one or more of:
[0112] i) contacting the population of cells with a reagent (e.g., antibody molecule) that binds a T cell antigen other than CD3 or CD28, e.g., binds CD4 or CD8, and collecting cells that bind the reagent;
[0113] ii) contacting the population of cells with a reagent (e.g., antibody molecule) that binds a tumor antigen other than CD19, e.g., binds CD20, CD22, ROR1, CD10, CD34, CD123, FLT-3, CD79b, CD179b, or CD79a and collecting cells that do not bind the reagent; or
[0114] iii) contacting the population of cells with a therapeutic that preferentially reduces the number of (e.g., kills or inhibits proliferation of) cancer cells compared to noncancerous immune effector cells, wherein the therapeutic is other than a BTK inhibitor, e.g., other than ibrutinib, e.g., wherein the therapeutic comprises an antibody molecule or an antibody drug conjugate.
   Methods of Treating a Patient and/or Selecting a Patient for Treatment with CAR-Expressing Cells

[0115] The present disclosure provides, in some aspects, a method of treating a subject having a cancer, comprising:

[0116] (a) providing a population of cells from the subject, wherein the population comprises cancer cells;

[0117] (b) determining the number or proportion of cells (e.g., of total cells or of cancer cells) in the population that lack a first tumor antigen (e.g., CD19) or a gene encoding the first tumor antigen, wherein the first tumor antigen is bound by a plurality of CAR-expressing cells,

[0118] (c)(i) if the number or proportion of (b) is less than a reference value, then administering the plurality of CAR-expressing cells to the subject, or

[0119] (c)(ii) if the number or proportion of (b) is greater than the reference value, than administering to the subject an anti-cancer therapy other than therapy with the plurality of CAR-expressing cells.

[0120] The present disclosure also provides, in some aspects, a method of selecting a subject having a cancer for therapy with a plurality of CAR-expressing cells, comprising:

[0121] (a) providing a population of cells from the subject, wherein the population comprises cancer cells;

[0122] (b) determining the number or proportion of total cells or of cancer cells in the population that lack a first tumor antigen (e.g., CD19) or a gene encoding the first tumor antigen, wherein the CAR-expressing cells bind the first tumor antigen,

[0123] (c)(i) if the number or proportion of (b) is less than a reference value, then selecting the subject for therapy with the plurality of CAR-expressing cells, or

[0124] (c)(ii) if the number or proportion of (b) is greater than the reference value, than selecting the subject for an anti-cancer therapy other than therapy with the plurality of CAR-expressing cells.

[0125] In some embodiments, the anti-cancer therapy other than therapy with the plurality of CAR-expressing cells comprises chemotherapy, surgery, radiation, or therapy with a different plurality of CAR-expressing cells that binds a second tumor antigen.

[0126] In some embodiments, the plurality of CAR-expressing cells is a plurality of CD19 CAR expressing cells, e.g., cells expressing a CD19 CAR of Table 3. In some embodiments, the plurality of CAR-expressing cells is a plurality of BCMA CAR expressing cells, e.g., cells expressing a BCMA CAR of Table 5 or Table 6.

[0127] In some embodiments, the cancer is ALL. In some embodiments, the cancer cell is a hematologic cancer cell or a circulating tumor cell (e.g., a circulating tumor cell from a solid tumor).

[0128] In some embodiments, (b) comprises performing a nucleic acid detection method, e.g., PCR, e.g., quantitative PCR, to determine the level or proportion of cancer cells in the sample, e.g., ALL cells. In some embodiments, (b) comprises performing a deep sequencing method, e.g., DNA sequencing or RNA sequencing, e.g., embedded PCR amplification and sequencing, e.g., sequencing of the tumor antigen (e.g., CD19) locus and optionally classifying the tumor antigen locus as having a mutation (e.g., deletion).

### Methods of Treatment

[0129] In another aspect, the present invention provides a method comprising administering to a subject (e.g., a subject who has experienced relapse from a prior administration of a target CAR therapy), an anti-target CAR molecule, e.g., as described herein, or a cell comprising one or more nucleic acids encoding an anti-target CAR molecule, e.g., as described herein. In one embodiment, the subject has a disease associated with expression of a target CAR (e.g., a disease in which a target CAR is expressed). In one embodiment, the subject is a human.

[0130] In another aspect, the invention pertains to a method of treating a subject (e.g., a subject who has experienced relapse from a prior administration of a target CAR therapy), having a disease associated with expression of a target CAR (e.g., a disease in which a target CAR is expressed) comprising administering to the subject an effective amount of a cell comprising an anti-target CAR molecule, e.g., as described herein.

[0131] In yet another aspect, the invention features a method of treating a subject (e.g., a subject who has experienced relapse from a prior administration of a target CAR therapy), having a disease associated with expression of a target CAR (e.g., a disease in which a target CAR is expressed), comprising administering to the subject an effective amount of a cell, e.g., an immune effector cell (e.g., a population of immune effector cells) comprising an anti-target CAR molecule, wherein the anti-target CAR molecule a ligand that binds a target CAR, a transmembrane domain, and an intracellular domain, said intracellular domain comprises a costimulatory domain and/or a primary signaling domain, wherein said ligand binds to the target CAR associated with the disease.

[0132] In a related aspect, the invention features a method of treating a subject (e.g., a subject who has experienced relapse from a prior administration of a target CAR therapy), having a disease associated with expression of a target CAR (e.g., a disease in which a target CAR is expressed). The method comprises administering to the subject an effective amount of a cell, e.g., an immune effector cell (e.g., a population of immune effector cells) comprising an anti-target CAR molecule, in combination with an agent that increases the efficacy of the immune cell, wherein:

[0133] the anti-target CAR molecule comprises ligand that binds to a target CAR, a transmembrane domain, and an intracellular domain comprising a costimulatory domain and/or a primary signaling domain, wherein said ligand binds to the target CAR, e.g., binds an extracellular domain of the target CAR; and

[0134] the agent that increases the efficacy of the immune cell is chosen from one or more of:

[0135] a protein phosphatase inhibitor;

[0136] a kinase inhibitor;

[0137] a cytokine;

[0138] an inhibitor of an immune inhibitory molecule; or

[0139] an agent that decreases the level or activity of a T_{REG} cell.

[0140] In a related aspect, the invention features a method of treating a subject (e.g., a subject who has experienced relapse from a prior administration of a target CAR therapy), having a disease associated with expression of a target CAR (e.g., a disease in which a target CAR is expressed), comprising administering to the subject an effective amount of a cell, e.g., an immune effector cell (e.g., a population of immune effector cells) comprising an anti-target CAR molecule, wherein:

[0141] the anti-target CAR molecule comprises a ligand that binds to a target CAR, a transmembrane domain, and an intracellular domain comprising a costimulatory domain and/or a primary signaling domain, wherein said ligand binds to the target CAR, e.g., binds an extracellular domain of the target CAR; and

[0142] the ligand of the anti-target CAR molecule comprises an antibody molecule and has a binding affinity at least 5-fold less than the antibody from which the ligand is derived.

[0143] In another aspect, the invention features a composition comprising an immune effector cell (e.g., a population of immune effector cells) comprising an anti-target CAR molecule, e.g., as described herein for use in the treatment of a subject having disease associated with expression of a target CAR (e.g., a disease in which a target CAR is expressed).

[0144] In certain embodiments of any of the aforesaid methods or uses the disease associated with expression of a target CAR, is selected from a proliferative disease such as a cancer or malignancy or a precancerous condition such as a myelodysplasia, a myelodysplastic syndrome or a preleukemia, or is a non-cancer related indication associated with expression of a tumor antigen described herein. In one embodiment, the disease is a cancer described herein, e.g., a cancer described herein as being associated with a target CAR. In one embodiment, the disease is a hematologic cancer. In one embodiment, the hematologic cancer is leukemia. In one embodiment, the cancer is selected from the group consisting of one or more acute leukemias including but not limited to B-cell acute lymphoid leukemia (“BALL”), T-cell acute lymphoid leukemia (“TALL”), acute lymphoid leukemia (ALL); one or more chronic leukemias including but not limited to chronic myelogenous leukemia (CML), chronic lymphocytic leukemia (CLL); additional hematologic cancers or hematologic conditions including, but not limited to B cell prolymphocytic leukemia, blastic plasmacytoid dendritic cell neoplasm, Burkitt's lymphoma, diffuse large B cell lymphoma, follicular lymphoma, hairy cell leukemia, small cell- or a large cell-follicular lymphoma, malignant lymphoproliferative conditions, MALT lymphoma, mantle cell lymphoma, Marginal zone lymphoma, multiple myeloma, myelodysplasia and myelodysplastic syndrome, non-Hodgkin lymphoma, Hodgkin lymphoma, plasmablastic lymphoma, plasmacytoid dendritic cell neoplasm, Waldenstrom macroglobulinemia, and “preleukemia” which are a diverse collection of hematological conditions united by ineffective production (or dysplasia) of myeloid blood cells, and to disease associated with expression of a target CAR described herein include, but not limited to, atypical and/or non-classical cancers, malignancies, precancerous conditions or proliferative diseases expressing a target CAR as described herein; and any combination thereof. In another embodiment, the disease associated with expression of a target CAR described herein is a solid tumor.

[0145] In certain embodiments of any of the aforesaid methods or uses, the disease associated with a target CAR is a disease in which any one, or more of the following tumor antigens were expressed at an earlier time point, e.g., during initial diagnosis or prior to administration of target CAR, but are altered (e.g., present at a lower level) or absent in at least a sub-population of cells when the anti-target CAR is administered: CD19, CD123, CD22, CD30, CD171, CS-1, CLL-1 (CLECL1), CD33, EGFRvIII, GD2, GD3, BCMA, Tn Ag, PSMA, ROR1, FLT3, TAG72, CD38, CD44v6, CEA, EPCAM, B7H3, KIT, IL-13Ra2, Mesothelin, IL-11Ra, PSCA, PRSS21, VEGFR2, LewisY, CD24, PDGFR-beta, SSEA-4, CD20, Folate receptor alpha, ERBB2 (Her2/neu), MUC1, EGFR, NCAM, Prostase, PAP, ELF2M, Ephrin B2, FAP, IGF-I receptor, CAIX, LMP2, gp100, bcr-abl, tyrosinase, EphA2, Fucosyl GM1, sLe, GM3, TGS5, HMWMAA, o-acetyl-GD2, Folate receptor beta, TEM1/CD248, TEM7R, CLDN6, TSHR, GPRC5D, CXORF61, CD97, CD179a, ALK, Polysialic acid, PLAC1, GloboH, NY-BR-1, UPK2, HAVCR1, ADRB3, PANX3, GPR20, LY6K, OR51E2, TARP, WT1, NY-ESO-1, LAGE-1a, MAGE-A1, MAGE A1, ETV6-AML, sperm protein 17, XAGE1, Tie 2, MAD-CT-1, MAD-CT-2, Fos-related antigen 1, p53, p53 mutant, prostein, survivin and telomerase, PCTA-1/Galectin 8, MelanA/MART1, Ras mutant, hTERT, sarcoma translocation breakpoints, ML-IAP, ERG (TMPRSS2 ETS fusion gene), NA17, PAX3, Androgen receptor, Cyclin B1, MYCN, RhoC, TRP-2, CYP1B1, BORIS, SART3, PAX5, OY-TES1, LCK, AKAP-4, SSX2, RAGE-1, human telomerase reverse transcriptase, RU1, RU2, legumain, HPV E6, E7, intestinal carboxyl esterase, mut hsp70-2, CD79a, CD79b, CD72, LAIR1, FCAR, LILRA2, CD300LF, CLEC12A, BST2, EMR2, LY75, GPC3, FCRL5, and IGLL1.

[0146] In other embodiments of any of the aforesaid methods or uses, the disease associated with a target CAR is a disease in which any one, or more of the following tumor antigens were expressed at an earlier time point, e.g., during initial diagnosis or prior to administration of target CAR, but are altered (e.g., present at a lower level) or absent in at least a sub-population of cells when the anti-target CAR is administered: TSHR, TSHR, CD171, CS-1, CLL-1, GD3, Tn Ag, FLT3, CD38, CD44v6, B7H3, KIT, IL-13Ra2, IL-11Ra, PSCA, PRSS21, VEGFR2, LewisY, CD24, PDGFR-beta, SSEA-4, MUC1, EGFR, NCAM, CAIX, LMP2, EphA2, Fucosyl GM1, sLe, GM3, TGS5, HMWMAA, o-acetyl-GD2, Folate receptor beta, TEM1/CD248, TEM7R, CLDN6, GPRC5D, CXORF61, CD97, CD179a, ALK, Polysialic acid, PLAC1, GloboH, NY-BR-1, UPK2, HAVCR1, ADRB3, PANX3, GPR20, LY6K, OR51E2, TARP, WT1, ETV6-AML, sperm protein 17, XAGE1, Tie 2, MAD-CT-1, MAD-CT-2, Fos-related antigen 1, p53 mutant, hTERT, sarcoma translocation breakpoints, ML-IAP, ERG (TMPRSS2 ETS fusion gene), NA17, PAX3, Androgen receptor, Cyclin B1, MYCN, RhoC, CYP1B1, BORIS, SART3, PAX5, OY-TES1, LCK, AKAP-4, SSX2, CD79a, CD79b, CD72, LAIR1, FCAR, LILRA2, CD300LF, CLEC12A, BST2, EMR2, LY75, GPC3, FCRL5, and IGLL1.

[0147] In other embodiments of any of the aforesaid methods or uses, the disease associated with a target CAR is a disease in which any one, or more of the following tumor antigens were expressed at an earlier time point, e.g., during initial diagnosis or prior to administration of target CAR, but are altered (e.g., present at a lower level) or absent in at least a sub-population of cells when the anti-target CAR is administered: TSHR, CLDN6, GPRC5D, CXORF61, CD97, CD179a, ALK, Polysialic acid, PLAC1, GloboH, NY-BR-1, UPK2, HAVCR1, ADRB3, PANX3, GPR20, LY6K, OR51E2, CD150, 5T4, ActRIIA, B7, BMCA, CA-125, CCNA1, CD123, CD126, CD138, CD14, CD148, CD15, CD19, CD20, CD200, CD21, CD22, CD23, CD24, CD25, CD26, CD261, CD262, CD30, CD33, CD362, CD37, CD38, CD4, CD40, CD40L, CD44, CD46, CD5, CD52, CD53, CD54, CD56, CD66a-d, CD74, CD8, CD80, CD92, CE7, CS-1, CSPG4, ED-B fibronectin, EGFR, EGFRvIII, EGP-2, EGP-4, EPHa2, ErbB2, ErbB3, ErbB4, FBP, GD2, GD3, HER1-HER2 in combination, HER2-HER3 in combination, HERV-K, HIV-1 envelope glycoprotein gp120, HIV-1 envelope glycoprotein gp41, HLA-DR, HM1.24, HMW-MAA, Her2, Her2/neu, IGF-1R, IL-11R-alpha, IL-13R-alpha2, IL-2, IL-22R-alpha, IL-6, IL-6R, Ia, Ii, L1-CAM, L1-cell adhesion molecule, Lewis Y, L1-CAM, MAGE A3, MAGE-A1, MART-1, MUC1, NKG2C ligands, NKG2D Ligands, NY-ESO-1, OEPHa2, PIGF, PSCA, PSMA, ROR1, T101, TAC, TAG72, TIM-3, TRAIL-R1, TRAIL-R1 (DR4), TRAIL-R2 (DR5), VEGF, VEGFR2, WT-1, a G-protein coupled receptor, alphafetoprotein (AFP), an angiogenesis factor, an exogenous cognate binding molecule (ExoCBM), oncogene product, anti-folate receptor, c-Met, carcinoembryonic antigen (CEA), cyclin (D1), ephrinB2, epithelial tumor antigen, estrogen receptor, fetal acethycholine e receptor, folate binding protein, gp100, hepatitis B surface antigen, kappa chain, kappa light chain, kdr, lambda chain, livin, melanoma-associated antigen, mesothelin, mouse double minute 2 homolog (MDM2), mucin 16 (MUC16), mutated p53, mutated ras, necrosis antigens, oncofetal antigen, ROR2, progesterone receptor, prostate specific antigen, tEGFR, tenascin, β2-Microglobulin, Fc Receptor-like 5 (FcRL5), or molecules expressed by HIV, HCV, HBV, or other pathogens.

[0148] In certain embodiments, the methods or uses are carried out in combination with an agent that increases the efficacy of the immune effector cell, e.g., an agent as described herein.

[0149] In any of the aforesaid methods or uses, the disease associated with expression of a target CAR (e.g., a disease in which a target CAR is expressed) is selected from the group consisting of a proliferative disease, a precancerous condition, a cancer, and a non-cancer related indication, e.g., B cell aplasia, associated with expression of the target CAR. In an embodiment, the non-cancer indication is B cell aplasia.

[0150] The cancer can be a hematologic cancer, e.g., a cancer chosen from one or more of chronic lymphocytic leukemia (CLL), acute leukemias, acute lymphoid leukemia (ALL), B-cell acute lymphoid leukemia (B-ALL), T-cell acute lymphoid leukemia (T-ALL), chronic myelogenous leukemia (CML), B cell prolymphocytic leukemia, blastic plasmacytoid dendritic cell neoplasm, Burkitt's lymphoma, diffuse large B cell lymphoma, follicular lymphoma, hairy cell leukemia, small cell- or a large cell-follicular lymphoma, malignant lymphoproliferative conditions, MALT lymphoma, mantle cell lymphoma, marginal zone lymphoma, multiple myeloma, myelodysplasia and myelodysplastic syndrome, non-Hodgkin's lymphoma, Hodgkin's lymphoma, plasmablastic lymphoma, plasmacytoid dendritic cell neoplasm, Waldenstrom macroglobulinemia, or pre-leukemia.

[0151] The cancer can also be chosen from colon cancer, rectal cancer, renal-cell carcinoma, liver cancer, non-small cell carcinoma of the lung, cancer of the small intestine, cancer of the esophagus, melanoma, bone cancer, pancreatic cancer, skin cancer, cancer of the head or neck, cutaneous or intraocular malignant melanoma, uterine cancer, ovarian cancer, rectal cancer, cancer of the anal region, stomach cancer, testicular cancer, uterine cancer, carcinoma of the fallopian tubes, carcinoma of the endometrium, carcinoma of the cervix, carcinoma of the vagina, carcinoma of the vulva, Hodgkin's Disease, non-Hodgkin's lymphoma, cancer of the endocrine system, cancer of the thyroid gland, cancer of the parathyroid gland, cancer of the adrenal gland, sarcoma of soft tissue, cancer of the urethra, cancer of the penis, solid tumors of childhood, cancer of the bladder, cancer of the kidney or ureter, carcinoma of the renal pelvis, neoplasm of the central nervous system (CNS), primary CNS lymphoma, tumor angiogenesis, spinal axis tumor, brain stem glioma, pituitary adenoma, Kaposi's sarcoma, epidermoid cancer, squamous cell cancer, T-cell lymphoma, environmentally induced cancers, combinations of said cancers, and metastatic lesions of said cancers.

### Methods of Making CAR-Expressing Cells

[0152] In another aspect, the invention pertains to a method of making a cell (e.g., an immune effector cell or population thereof) comprising introducing into (e.g., transducing) a cell, e.g., a T cell or a NK cell described herein, with a vector of comprising a nucleic acid encoding an anti-target CAR, e.g., an anti-target CAR polypeptide, e.g., as described herein; or a nucleic acid encoding an anti-target CAR molecule, e.g., as described herein.

[0153] The cell in the methods is an immune effector cell (e.g., a T cell or a NK cell, or a combination thereof). In some embodiments, the cell in the methods is diacylglycerol kinase (DGK) and/or Ikaros deficient.

[0154] In some embodiment, introducing the nucleic acid molecule encoding an anti-target CAR, e.g., as described herein, comprises transducing a vector comprising the nucleic acid molecule encoding an anti-target CAR, e.g., as described herein, or transfecting the nucleic acid molecule encoding an anti-target CAR, e.g., as described herein, wherein the nucleic acid molecule is an in vitro transcribed RNA.

[0155] In some embodiments, the method further comprises:

[0156] providing a population of immune effector cells (e.g., T cells or NK cells); and

[0157] removing T regulatory cells from the population, thereby providing a population of T regulatory-depleted cells;

[0158] wherein steps a) and b) are performed prior to introducing the nucleic acid encoding the anti-target CAR to the population. In embodiments of the methods, the T regulatory cells comprise CD25+ T cells, and are removed from the cell population using an anti-CD25 antibody, or fragment thereof. The anti-CD25 antibody, or fragment thereof, can be conjugated to a substrate, e.g., a bead.

[0159] In other embodiments, the population of T regulatory-depleted cells provided from step (b) contains less than 30%, 25%, 20%, 15%, 10%, 5%, 4%, 3%, 2%, 1% of CD25+ cells.

[0160] In yet other embodiments, the method further comprises:

[0161] removing cells from the population which express a tumor antigen that does not comprise CD25 to provide a population of T regulatory-depleted and tumor antigen depleted cells prior to introducing the nucleic acid encoding an anti-target CAR to the population. The tumor antigen can be selected from CD19, CD30, CD38, CD123, CD20, CD14 or CD11b, or a combination thereof.

[0162] In other embodiments, the method further comprises

[0163] removing cells from the population which express a checkpoint inhibitor, to provide a population of T regulatory-depleted and inhibitory molecule depleted cells prior to introducing the nucleic acid encoding an anti-target CAR to the population. The checkpoint inhibitor can be chosen from PD-1, LAG-3, TIM3, B7-H1, CD160, P1H, 2B4, CEACAM (e.g., CEACAM-1, CEACAM-3, and/or CEACAM-5), TIGIT, CTLA-4, BTLA, and LAIR1.

[0164] Further embodiments disclosed herein encompass providing a population of immune effector cells. The population of immune effector cells provided can be selected based upon the expression of one or more of CD3, CD28, CD4, CD8, CD45RA, and/or CD45RO. In certain embodiments, the population of immune effector cells provided are CD3+ and/or CD28+.

[0165] In certain embodiments of the method, the method further comprises expanding the population of cells after the nucleic acid molecule encoding an anti-target CAR has been introduced.

[0166] In embodiments, the population of cells is expanded for a period of 8 days or less.

[0167] In certain embodiments, the population of cells is expanded in culture for 5 days, and the resulting cells are more potent than the same cells expanded in culture for 9 days under the same culture conditions.

[0168] In other embodiments, the population of cells is expanded in culture for 5 days show at least a one, two, three or four fold increase in cell doublings upon antigen stimulation as compared to the same cells expanded in culture for 9 days under the same culture conditions.

[0169] In yet other embodiments, the population of cells is expanded in culture for 5 days, and the resulting cells exhibit higher proinflammatory IFN-γ and/or GM-CSF levels, as compared to the same cells expanded in culture for 9 days under the same culture conditions.

[0170] In other embodiments, the population of cells is expanded by culturing the cells in the presence of an agent that stimulates a CD3/TCR complex associated signal and/or a ligand that stimulates a costimulatory molecule on the surface of the cells. The agent can be a bead conjugated with anti-CD3 antibody, or a fragment thereof, and/or anti-CD28 antibody, or a fragment thereof.

[0171] In other embodiments, the population of cells is expanded in an appropriate media that includes one or more interleukin that result in at least a 200-fold, 250-fold, 300-fold, or 350-fold increase in cells over a 14 day expansion period, as measured by flow cytometry.

[0172] In other embodiments, the population of cells is expanded in the presence IL-15 and/or IL-7.

[0173] In certain embodiments, the method further includes cryopreserving the population of the cells after the appropriate expansion period.

[0174] In yet other embodiments, the method of making disclosed herein further comprises contacting the population of immune effector cells with a nucleic acid encoding a telomerase subunit, e.g., hTERT. The nucleic acid encoding the telomerase subunit can be DNA.

[0175] The present invention also provides a method of generating a population of RNA-engineered cells, e.g., cells described herein, e.g., immune effector cells (e.g., T cells, NK cells), transiently expressing exogenous RNA. The method comprises introducing an in vitro transcribed RNA or synthetic RNA into a cell, where the RNA comprises a nucleic acid encoding an anti-target CAR molecule, e.g., as described herein.

[0176] In another aspect, the invention pertains to a method of providing an anti-tumor immunity in a subject comprising administering to the subject an effective amount of a cell comprising an anti-target CAR molecule, e.g., as described herein. In one embodiment, the cell is an autologous T cell or NK cell. In one embodiment, the cell is an allogeneic T cell or NK cell. In one embodiment, the autologous or allogenic T cell or NK cell lacks expression or has low expression of a functional TCR or a functional HLA. In one embodiment, the subject is a human.

[0177] In one aspect, the invention includes a population of autologous cells that are transfected or transduced with a vector comprising a nucleic acid molecule encoding an anti-target CAR molecule, e.g., as described herein. In one embodiment, the vector is a retroviral vector. In one embodiment, the vector is a self-inactivating lentiviral vector as described elsewhere herein. In one embodiment, the vector is delivered (e.g., by transfecting or electroporating) to a cell, e.g., a T cell or a NK cell, wherein the vector comprises a nucleic acid molecule encoding an anti-target CAR, e.g., as described herein, which is transcribed as an mRNA molecule, and the anti-target CARs of the present invention is translated from the RNA molecule and expressed on the surface of the cell.

[0178] In another aspect, the present invention provides a population of cells wherein at least one cell in the population expresses an anti-target CAR having a ligand that binds a target CAR as described herein, and a second cell expressing another agent, e.g., an agent which enhances the activity of an anti-target CAR-expressing cell. For example, in one embodiment, the agent can be an agent which inhibits an inhibitory molecule. Examples of inhibitory molecules include PD-1, PD-L1, CTLA-4, TIM-3, CEACAM (e.g., CEACAM-1, CEACAM-3 and/or CEACAM-5), LAG-3, VISTA, BTLA, TIGIT, LAIR1, CD160, 2B4 and TGF beta. In one embodiment, the agent which inhibits an inhibitory molecule, e.g., is a molecule described herein, e.g., an agent that comprises a first polypeptide, e.g., an inhibitory molecule, associated with a second polypeptide that provides a positive signal to the cell, e.g., an intracellular signaling domain described herein. In one embodiment, the agent comprises a first polypeptide, e.g., of an inhibitory molecule such as PD-1, LAG-3, CTLA-4, CD160, BTLA, LAIR1, TIM-3, CEACAM (e.g., CEACAM-1, CEACAM-3 and/or CEACAM-5), 2B4 and TIGIT, or a fragment of any of these, and a second polypeptide which is an intracellular signaling domain described herein (e.g., comprising a costimulatory domain (e.g., 4-1BB, CD27 or CD28, e.g., as described herein) and/or a primary signaling domain (e.g., a CD3 zeta signaling domain described herein). In one embodiment, the agent comprises a first polypeptide of PD-1 or a fragment thereof, and a second polypeptide of an intracellular signaling domain described herein (e.g., a CD28, CD27, OX40 or 4-IBB signaling domain described herein and/or a CD3 zeta signaling domain described herein).

[0179] In one embodiment, the nucleic acid molecule encoding an anti-target CAR of the present invention molecule, e.g., as described herein, is expressed as an mRNA molecule. In one embodiment, the genetically modified anti-target CAR of the present invention-expressing cells, e.g., immune effector cells (e.g., T cells, NK cells), can be generated by transfecting or electroporating an RNA molecule encoding the desired anti-target CARs (e.g., without a vector sequence) into the cell. In one embodiment, an anti-target CAR of the present invention molecule is translated from the RNA molecule once it is incorporated and expressed on the surface of the recombinant cell.

### Target CAR

[0180] In an embodiment, a target CAR as described herein, comprises: i) an antigen binding domain, ii) a transmembrane domain, and iii) an intracellular signaling domain, e.g., comprising a primary signaling domain and/or a costimulatory domain.

[0181] In some embodiments, the antigen binding domain of the target CAR binds a tumor antigen, e.g., a tumor antigen described herein. In some embodiments, the tumor antigen is chosen from one or more of: CD19; CD123; CD22; CD30; CD171; CS-1 (also referred to as CD2 subset 1, CRACC, SLAMF7, CD319, and 19A24); C-type lectin-like molecule-1 (CLL-1 or CLECL1); CD33; epidermal growth factor receptor variant III (EGFRvIII); ganglioside G2 (GD2); ganglioside GD3 (aNeu5Ac(2-8)aNeu5Ac(2-3)bDGalp(1-4)bDGlcp(1-1)Cer); TNF receptor family member B cell maturation (BCMA); Tn antigen ((Tn Ag) or (GalNAcα-Ser/Thr)); prostate-specific membrane antigen (PSMA); Receptor tyrosine kinase-like orphan receptor 1 (ROR1); Fms-Like Tyrosine Kinase 3 (FLT3); Tumor-associated glycoprotein 72 (TAG72); CD38; CD44v6; Carcinoembryonic antigen (CEA); Epithelial cell adhesion molecule (EPCAM); B7H3 (CD276); KIT (CD117); Interleukin-13 receptor subunit alpha-2 (IL-13Ra2 or CD213A2); Mesothelin; Interleukin 11 receptor alpha (IL-11Ra); prostate stem cell antigen (PSCA); Protease Serine 21 (Testisin or PRSS21); vascular endothelial growth factor receptor 2 (VEGFR2); Lewis(Y) antigen; CD24; Platelet-derived growth factor receptor beta (PDGFR-beta); Stage-specific embryonic antigen-4 (SSEA-4); CD20; Folate receptor alpha; Receptor tyrosine-protein kinase ERBB2 (Her2/neu); Mucin 1, cell surface associated (MUC1); epidermal growth factor receptor (EGFR); neural cell adhesion molecule (NCAM); Prostase; prostatic acid phosphatase (PAP); elongation factor 2 mutated (ELF2M); Ephrin B2; fibroblast activation protein alpha (FAP); insulin-like growth factor 1 receptor (IGF-I receptor), carbonic anhydrase IX (CAIX); Proteasome (Prosome, Macropain) Subunit, Beta Type, 9 (LMP2); glycoprotein 100 (gp100); oncogene fusion protein consisting of breakpoint cluster region (BCR) and Abelson murine leukemia viral oncogene homolog 1 (Abl) (bcr-abl); tyrosinase; ephrin type-A receptor 2 (EphA2); Fucosyl GM1; sialyl Lewis adhesion molecule (sLe); ganglioside GM3 (aNeu5Ac(2-3)bDGalp(1-4)bDGlcp(1-1)Cer); transglutaminase 5 (TGS5); high molecular weight-melanoma-associated antigen (HMWMAA); o-acetyl-GD2 ganglioside (OAcGD2); Folate receptor beta; tumor endothelial marker 1 (TEM1/CD248); tumor endothelial marker 7-related (TEM7R); claudin 6 (CLDN6); thyroid stimulating hormone receptor (TSHR); G protein-coupled receptor class C group 5, member D (GPRC5D); chromosome X open reading frame 61 (CXORF61); CD97; CD179a; anaplastic lymphoma kinase (ALK); Polysialic acid; placenta-specific 1 (PLAC1); hexasaccharide portion of globoH glycoceramide (GloboH); mammary gland differentiation antigen (NY-BR-1); uroplakin 2 (UPK2); Hepatitis A virus cellular receptor 1 (HAVCR1); adrenoceptor beta 3 (ADRB3); pannexin 3 (PANX3); G protein-coupled receptor 20 (GPR20); lymphocyte antigen 6 complex, locus K 9 (LY6K); Olfactory receptor 51E2 (OR51E2); TCR Gamma Alternate Reading Frame Protein (TARP); Wilms tumor protein (WT1); Cancer/testis antigen 1 (NY-ESO-1); Cancer/testis antigen 2 (LAGE-1a); Melanoma-associated antigen 1 (MAGE-A1); ETS translocation-variant gene 6, located on chromosome 12p (ETV6-AML); sperm protein 17 (SPA17); X Antigen Family, Member 1A (XAGE1); angiopoietin-binding cell surface receptor 2 (Tie 2); melanoma cancer testis antigen-1 (MAD-CT-1); melanoma cancer testis antigen-2 (MAD-CT-2); Fos-related antigen 1; tumor protein p53 (p53); p53 mutant; prostein; surviving; telomerase; prostate carcinoma tumor antigen-1 (PCTA-1 or Galectin 8), melanoma antigen recognized by T cells 1 (MelanA or MART1); Rat sarcoma (Ras) mutant; human Telomerase reverse transcriptase (hTERT); sarcoma translocation breakpoints; melanoma inhibitor of apoptosis (ML-IAP); ERG (transmembrane protease, serine 2 (TMPRSS2) ETS fusion gene); N-Acetyl glucosaminyl-transferase V (NA17); paired box protein Pax-3 (PAX3); Androgen receptor; Cyclin B1; v-myc avian myelocytomatosis viral oncogene neuroblastoma derived homolog (MYCN); Ras Homolog Family Member C (RhoC); Tyrosinase-related protein 2 (TRP-2); Cytochrome P450 1B1 (CYP1B1); CCCTC-Binding Factor (Zinc Finger Protein)—Like (BORIS or Brother of the Regulator of Imprinted Sites), Squamous Cell Carcinoma Antigen Recognized By T Cells 3 (SART3); Paired box protein Pax-5 (PAX5); proacrosin binding protein sp32 (OY-TES1); lymphocyte-specific protein tyrosine kinase (LCK); A kinase anchor protein 4 (AKAP-4); synovial sarcoma, X breakpoint 2 (SSX2); Receptor for Advanced Glycation Endproducts (RAGE-1); renal ubiquitous 1 (RU1); renal ubiquitous 2 (RU2); legumain; human papilloma virus E6 (HPV E6); human papilloma virus E7 (HPV E7); intestinal carboxyl esterase; heat shock protein 70-2 mutated (mut hsp70-2); CD79a; CD79b; CD72; Leukocyte-associated immunoglobulin-like receptor 1 (LAIR1); Fc fragment of IgA receptor (FCAR or CD89); Leukocyte immunoglobulin-like receptor subfamily A member 2 (LILRA2); CD300 molecule-like family member f (CD300LF); C-type lectin domain family 12 member A (CLEC12A); bone marrow stromal cell antigen 2 (BST2); EGF-like module-containing mucin-like hormone receptor-like 2 (EMR2); lymphocyte antigen 75 (LY75); Glypican-3 (GPC3); Fc receptor-like 5 (FCRL5); and immunoglobulin lambda-like polypeptide 1 (IGLL1).

[0182] In some embodiments, tumor antigen bound by the target CAR is chosen from one or more of: TSHR, CD171, CS-1, CLL-1, GD3, Tn Ag, FLT3, CD38, CD44v6, B7H3, KIT, IL-13Ra2, IL-11Ra, PSCA, PRSS21, VEGFR2, LewisY, CD24, PDGFR-beta, SSEA-4, MUC1, EGFR, NCAM, CAIX, LMP2, EphA2, Fucosyl GM1, sLe, GM3, TGS5, HMWMAA, o-acetyl-GD2, Folate receptor beta, TEM1/CD248, TEM7R, CLDN6, GPRC5D, CXORF61, CD97, CD179a, ALK, Polysialic acid, PLAC1, GloboH, NY-BR-1, UPK2, HAVCR1, ADRB3, PANX3, GPR20, LY6K, OR51E2, TARP, WT1, ETV6-AML, sperm protein 17, XAGE1, Tie 2, MAD-CT-1, MAD-CT-2, Fos-related antigen 1, p53 mutant, hTERT, sarcoma translocation breakpoints, ML-IAP, ERG (TMPRSS2 ETS fusion gene), NA17, PAX3, Androgen receptor, Cyclin B1, MYCN, RhoC, CYP1B1, BORIS, SART3, PAX5, OY-TES1, LCK, AKAP-4, SSX2, CD79a, CD79b, CD72, LAIR1, FCAR, LILRA2, CD300LF, CLEC12A, BST2, EMR2, LY75, GPC3, FCRL5, and IGLL1.

[0183] In certain embodiments, the tumor antigen bound by the target CAR is chosen from one or more of: TSHR, CLDN6, GPRC5D, CXORF61, CD97, CD179a, ALK, Polysialic acid, PLAC1, GloboH, NY-BR-1, UPK2, HAVCR1, ADRB3, PANX3, GPR20, LY6K, OR51E2, CD150, 5T4, ActRIIA, B7, BMCA, CA-125, CCNA1, CD123, CD126, CD138, CD14, CD148, CD15, CD19, CD20, CD200, CD21, CD22, CD23, CD24, CD25, CD26, CD261, CD262, CD30, CD33, CD362, CD37, CD38, CD4, CD40, CD40L, CD44, CD46, CD5, CD52, CD53, CD54, CD56, CD66a-d, CD74, CD8, CD80, CD92, CE7, CS-1, CSPG4, ED-B fibronectin, EGFR, EGFRvIII, EGP-2, EGP-4, EPHa2, ErbB2, ErbB3, ErbB4, FBP, GD2, GD3, HER1-HER2 in combination, HER2-HER3 in combination, HERV-K, HIV-1 envelope glycoprotein gp120, HIV-1 envelope glycoprotein gp41, HLA-DR, HM1.24, HMW-MAA, Her2, Her2/neu, IGF-1R, IL-11Ralpha, IL-13R-alpha2, IL-2, IL-22R-alpha, IL-6, IL-6R, Ia, Ii, L1-CAM, L1-cell adhesion molecule, Lewis Y, L1-CAM, MAGE A3, MAGE-A1, MART-1, MUC1, NKG2C ligands, NKG2D Ligands, NY-ESO-1, OEPHa2, PIGF, PSCA, PSMA, ROR1, T101, TAC, TAG72, TIM-3, TRAIL-R1, TRAIL-R1 (DR4), TRAIL-R2 (DR5), VEGF, VEGFR2, WT-1, a G-protein coupled receptor, alphafetoprotein (AFP), an angiogenesis factor, an exogenous cognate binding molecule (ExoCBM), oncogene product, anti-folate receptor, c-Met, carcinoembryonic antigen (CEA), cyclin (D1), ephrinB2, epithelial tumor antigen, estrogen receptor, fetal acethycholine e receptor, folate binding protein, gp100, hepatitis B surface antigen, kappa chain, kappa light chain, kdr, lambda chain, livin, melanoma-associated antigen, mesothelin, mouse double minute 2 homolog (MDM2), mucin 16 (MUC16), mutated p53, mutated ras, necrosis antigens, oncofetal antigen, ROR2, progesterone receptor, prostate specific antigen, tEGFR, tenascin, β2-Microglobulin, Fc Receptor-like 5 (FcRL5), or molecules expressed by HIV, HCV, HBV, or other pathogens.

[0184] In some embodiments, the antigen binding domain of the target CAR molecule comprises an antibody, an antibody fragment, an scFv, a Fv, a Fab, a (Fab′)2, a single domain antibody (SDAB), a VH or VL domain, or a camelid VHH domain.

[0185] In some embodiments, the transmembrane domain of the target CAR molecule comprises a transmembrane domain chosen from the transmembrane domain of an alpha, beta or zeta chain of a T-cell receptor, CD28, CD3 epsilon, CD45, CD4, CD5, CD8, CD9, CD16, CD22, CD33, CD37, CD64, CD80, CD86, CD134, CD137, CD154, KIRDS2, OX40, CD2, CD27, LFA-1 (CD11a, CD18), ICOS (CD278), 4-1BB (CD137), GITR, CD40, BAFFR, HVEM (LIGHTR), SLAMF7, NKp80 (KLRF1), CD160, CD19, IL2R beta, IL2R gamma, IL7R α, ITGA1, VLA1, CD49a, ITGA4, IA4, CD49D, ITGA6, VLA-6, CD49f, ITGAD, CD11d, ITGAE, CD103, ITGAL, CD11a, LFA-1, ITGAM, CD11b, ITGAX, CD11c, ITGB1, CD29, ITGB2, CD18, LFA-1, ITGB7, TNFR2, DNAM1 (CD226), SLAMF4 (CD244, 2B4), CD84, CD96 (Tactile), CEACAM1, CRTAM, Ly9 (CD229), CD160 (BY55), PSGL1, CD100 (SEMA4D), SLAMF6 (NTB-A, Ly108), SLAM (SLAMF1, CD150, IPO-3), BLAME (SLAMF8), SELPLG (CD162), LTBR, PAG/Cbp, NKp44, NKp30, NKp46, NKG2D, and/or NKG2C.

[0186] In one embodiment, the target CAR is a CD19 CAR, a CD22 CAR, a CD123 CAR, a CD33 CAR, a mesothelin CAR, an EGFRvIII CAR, a CLL-1 CAR, or a CAR described herein. In one embodiment, the target CAR is a CD19 CAR, e.g., a CAR comprising an scFv amino acid sequence of SEQ ID NOs: 893, 898, 903, 908, 913, 918, 923, 928, 933, 938, 943, 948, or 953, or a CAR comprising the amino acid sequence of SEQ ID NOs: 2020-2022.

[0187] In one embodiment, the target CAR comprises an antibody or antibody fragment which includes a anti-CD19 binding domain, a transmembrane domain, and an intracellular signaling domain comprising a stimulatory domain, and wherein said anti-CD19 binding domain comprises one or more of light chain complementary determining region 1 (LC CDR1), light chain complementary determining region 2 (LC CDR2), and light chain complementary determining region 3 (LC CDR3) of any anti-CD19 light chain binding domain amino acid sequence listed in Table 3, and one or more of heavy chain complementary determining region 1 (HC CDR1), heavy chain complementary determining region 2 (HC CDR2), and heavy chain complementary determining region 3 (HC CDR3) of any anti-CD19 heavy chain binding domain amino acid sequence listed in Table 3.

[0188] In one embodiment, the target CAR comprises an antibody or antibody fragment which includes a anti-CD19 binding domain, a transmembrane domain, and an intracellular signaling domain comprising a stimulatory domain, and wherein said anti-CD19 binding domain comprises one or more of light chain complementary determining region 1 (LC CDR1), light chain complementary determining region 2 (LC CDR2), and light chain complementary determining region 3 (LC CDR3) of any anti-CD19 light chain binding domain amino acid sequence listed in Table 4B, and one or more of heavy chain complementary determining region 1 (HC CDR1), heavy chain complementary determining region 2 (HC CDR2), and heavy chain complementary determining region 3 (HC CDR3) of any anti-CD19 heavy chain binding domain amino acid sequence listed in Table 4A.

[0189] In one embodiment, the anti-CD19 binding domain of the target CAR comprises a sequence of SEQ ID NO: 898, or SEQ ID NO:957.

[0190] In one embodiment, the target CAR comprises a polypeptide having a sequence of SEQ ID NO: 902, or SEQ ID NO: 956.

[0191] In certain embodiments, the target CAR antigen binding domain has a binding affinity KD of 10⁻⁴ M to 10⁻⁸ M.

[0192] In one embodiment, the target CAR antigen binding domain is an antigen binding domain described herein, e.g., an antigen binding domain described herein for a target provided above.

### BRIEF DESCRIPTION OF THE DRAWINGS

[0193] FIG. 1A shows in vitro killing assays with NALM6 WT or NALM6 CAR19+ expressing cells. CART19 cells or CART-CAR19 cells expressing anti-idiotypic scFv in the L2H or H2L orientation were incubated with target cells Killing of NAPM6 CAR19+ cells was observed with CART-CAR19 cells in the L2H orientation and CART-CAR19 cells in the H2L orientation.

[0194] FIG. 1B shows in vivo leukemia control in the CHP107R xenograft model by CART-CAR19 cells. CHP107R cells were engrafted in NOD-SCID gamma chain deficient (NSG) mice, and recipient animals were treated with the CAR19 or CART-CAR19 L2H cells, or left untreated.

[0195] FIGS. 2A-2D show depletion of CART19 expressing cells by anti-CAR CART expressing cells. Cells expressing anti-CAR CART were labeled with CFSE and cells expressing CART19 or CART22 were labeled with Cell tracker violet (CTV). The CFSE labeled cells and the CTV labeled cells were then co-cultured at different ratios and the ratio of CFSE:CTV signal was assessed by flow cytometry at 24 and 48 hours.

### DETAILED DESCRIPTION

[0196] In general, the invention features a T-cell containing an anti-target CAR which binds to a target CAR, e.g., a target CAR described herein.

### Definitions

[0197] Unless defined otherwise, all technical and scientific terms used herein have the same meaning as commonly understood by one of ordinary skill in the art to which the invention pertains.

[0198] The term “a” and “an” refers to one or to more than one (i.e., to at least one) of the grammatical object of the article. By way of example, “an element” means one element or more than one element.

[0199] The term “about” when referring to a measurable value such as an amount, a temporal duration, and the like, is meant to encompass variations of ±20% or in some instances ±10%, or in some instances ±5%, or in some instances ±1%, or in some instances ±0.1% from the specified value, as such variations are appropriate to perform the disclosed methods.

[0200] The term “Chimeric Antigen Receptor” or alternatively a “CAR” refers to a set of polypeptides, typically two in the simplest embodiments, which when in an immune effector cell, provides the cell with specificity for a target cell, typically a cancer cell, and with intracellular signal generation. In some embodiments, a CAR comprises at least an extracellular antigen binding domain, a transmembrane domain and a cytoplasmic signaling domain (also referred to herein as “an intracellular signaling domain”) comprising a functional signaling domain derived from a stimulatory molecule and/or costimulatory molecule as defined below. In some aspects, the set of polypeptides are contiguous with each other. In some embodiments, the set of polypeptides include a dimerization switch that, upon the presence of a dimerization molecule, can couple the polypeptides to one another, e.g., can couple an antigen binding domain to an intracellular signaling domain. In one aspect, the stimulatory molecule is the zeta chain associated with the T cell receptor complex. In one aspect, the cytoplasmic signaling domain further comprises one or more functional signaling domains derived from at least one costimulatory molecule as defined below. In one aspect, the costimulatory molecule is chosen from the costimulatory molecules described herein, e.g., 4-1BB (i.e., CD137), CD27 and/or CD28. In one aspect, the CAR comprises a chimeric fusion protein comprising an extracellular antigen binding domain, a transmembrane domain and an intracellular signaling domain comprising a functional signaling domain derived from a stimulatory molecule. In one aspect, the CAR comprises a chimeric fusion protein comprising an extracellular antigen binding domain, a transmembrane domain and an intracellular signaling domain comprising a functional signaling domain derived from a costimulatory molecule and a functional signaling domain derived from a stimulatory molecule. In one aspect, the CAR comprises a chimeric fusion protein comprising an extracellular antigen binding domain, a transmembrane domain and an intracellular signaling domain comprising two functional signaling domains derived from one or more costimulatory molecule(s) and a functional signaling domain derived from a stimulatory molecule. In one aspect, the CAR comprises a chimeric fusion protein comprising an extracellular antigen binding domain, a transmembrane domain and an intracellular signaling domain comprising at least two functional signaling domains derived from one or more costimulatory molecule(s) and a functional signaling domain derived from a stimulatory molecule. In one aspect the CAR comprises an optional leader sequence at the amino-terminus (N-ter) of the CAR fusion protein. In one aspect, the CAR further comprises a leader sequence at the N-terminus of the extracellular antigen binding domain, wherein the leader sequence is optionally cleaved from the antigen binding domain (e.g., a scFv) during cellular processing and localization of the CAR to the cellular membrane.

[0201] A CAR that comprises an antigen binding domain (e.g., a scFv, or TCR) that targets a specific tumor maker X, such as those described herein, is also referred to as XCAR. For example, a CAR that comprises an antigen binding domain that targets CD19 is referred to as CD19CAR.

[0202] As used herein, “anti-target CAR” refers to a CAR that binds a target CAR, e.g., binds the antigen binding domain of the target CAR, e.g., binds an antibody molecule portion of the target CAR. In some embodiments, an anti-target CAR comprises at least an extracellular ligand that binds to a target CAR, a transmembrane domain, and a cytoplasmic signaling domain comprising a functional signaling domain derived from a stimulatory molecule and/or costimulatory molecule, e.g., as described herein. In some embodiments, the ligand that binds to a target CAR comprises an antibody molecule (e.g., anti-idiotypic antibody molecule) that binds the target CAR, e.g., binds an extracellular domain of the target CAR, e.g., the antigen binding domain or hinge of the target CAR, e.g., binds an antibody molecule portion of the target CAR.

[0203] The term “ligand that binds to a target CAR” as used herein refers to a molecule that binds to a CAR polypeptide or a portion of a CAR polypeptide. The CAR polypeptide bound by the ligand that binds to a target CAR is referred to herein as a “target CAR”. In some embodiments, the ligand binds to the target CAR extracellular domain, e.g., the ligand binds to the target CAR antigen binding domain, e.g., the portion of the target CAR comprising an antibody or antibody fragment. In some embodiments, the ligand binds to the hinge of the target CAR. In some embodiments, the ligand binds the target CAR hinge and the target CAR antigen binding domain. In some embodiments, the ligand is an antigen molecule, e.g., a cognate antigen molecule, e.g., as described herein. In other embodiments, the ligand is an antibody molecule, e.g., an anti-idiotypic antibody molecule, e.g., an anti-antigen (e.g., CD19) idiotypic antibody molecule as described herein.

[0204] The term “cognate antigen molecule” refers to any antigen described herein. In some embodiments, it refers to an antigen bound, e.g., recognized or targeted, by a CAR polypeptide, e.g., any target CAR described herein. In some embodiments, it refers to a cancer associated antigen described herein. In some embodiments, the cognate antigen molecule is a recombinant molecule.

[0205] The term “anti-idiotypic (or idiotype) antibody molecule” or “anti-antigen idiotypic (idiotype) antibody molecule” refers to an antibody molecule that binds to an antibody, e.g., the antigen-binding site or the variable region of a target antibody (e.g., an antibody in the target CAR). In some embodiments, the anti-idiotypic antibody molecule competes for binding with the antigen recognized by the target antibody, e.g., an antigen as described herein (e.g., a cognate antigen molecule as described herein). In some embodiments, the anti-idiotypic antibody molecule binds to the CAR antigen binding domain, e.g., the portion of the CAR comprising an antibody or antibody fragment (e.g., the antigen binding portion of the CAR).

[0206] As used herein, “disease associated with expression of a target CAR” includes, but is not limited to, a disease associated with expression of a target CAR as described herein or condition associated with cells which express a target CAR as described herein including, e.g., proliferative diseases such as a cancer or malignancy or a precancerous condition such as a myelodysplasia, a myelodysplastic syndrome or a preleukemia; or a noncancer related indication associated with cells which express a target CAR as described herein. In an embodiment, the disease associated with expression of a target CAR is a cancer, e.g., a cancer wherein one or more cancer cells expresses a target CAR. In an embodiment, the disease associated with expression of a target CAR is B-cell aplasia. In an embodiment, a cancer associated with expression of a target CAR as described herein is a hematological cancer. In an embodiment, a cancer associated with expression of a target CAR as described herein is a solid cancer. In embodiments, the target CAR is expressed in cells of the disease associated with expression of a CAR.

As used herein, a “CD19-negative” cell refers to a cell having a loss or alteration in CD19. It shall be understood that a CD19-negative cancer need not have 100% loss of CD19, but a sufficient reduction to reduce the effectiveness of a CD19 therapy such that the cell is resistant to the CD19 therapy. In some embodiments the cells do not comprise the CD19 protein (e.g., do not comprise the CD19 protein expressed on the cell surface), and in other embodiments the cells comprise a portion of the CD19 protein that does not include the antigen. In some embodiments, the CD19-negative cells comprise a truncation, deletion, or frameshift mutation in CD19 that removes or mutates the antigen. Similarly, a “CD19-negative relapse” is a relapsed disease in which some or all of the cells, e.g., cancer cells, are CD19-negative cells, and a “CD19-negative cancer” is a cancer in which some or all of the cancer cells are CD19-negative cancer cells. Likewise, cells that are CD33-negative, EGFRvIII-negative, mesothelin-negative, BCMA-negative, CD20-negative, CD123-negative, or CLL-1 negative are cells that have a loss or alteration in the specified antigen bound by a CAR, e.g., the cells do not comprise the specified protein, or comprise a portion of the specified protein that does not comprise the specified antigen.

[0207] The term “signaling domain” refers to the functional portion of a protein which acts by transmitting information within the cell to regulate cellular activity via defined signaling pathways by generating second messengers or functioning as effectors by responding to such messengers.

[0208] The term “antibody,” as used herein, refers to a protein, or polypeptide sequence derived from an immunoglobulin molecule which specifically binds with an antigen. Antibodies can be polyclonal or monoclonal, multiple or single chain, or intact immunoglobulins, and may be derived from natural sources or from recombinant sources. Antibodies can be tetramers of immunoglobulin molecules.

[0209] The term “antibody fragment” refers to at least one portion of an antibody, that retains the ability to specifically interact with (e.g., by binding, steric hindrance, stabilizing/destabilizing, spatial distribution) an epitope of an antigen. Examples of antibody fragments include, but are not limited to, Fab, Fab′, F(ab′)₂, Fv fragments, scFv antibody fragments, disulfide-linked Fvs (sdFv), a Fd fragment consisting of the VH and CH1 domains, linear antibodies, single domain antibodies such as sdAb (either VL or VH), camelid VHH domains, multi-specific antibodies formed from antibody fragments such as a bivalent fragment comprising two Fab fragments linked by a disulfide bridge at the hinge region, and an isolated CDR or other epitope binding fragments of an antibody. An antigen binding fragment can also be incorporated into single domain antibodies, maxibodies, minibodies, nanobodies, intrabodies, diabodies, triabodies, tetrabodies, v-NAR and bis-scFv (see, e.g., Hollinger and Hudson, Nature Biotechnology 23:1126-1136, 2005). Antigen binding fragments can also be grafted into scaffolds based on polypeptides such as a fibronectin type III (Fn3)(see U.S. Pat. No. 6,703,199, which describes fibronectin polypeptide minibodies).

[0210] The term “scFv” refers to a fusion protein comprising at least one antibody fragment comprising a variable region of a light chain and at least one antibody fragment comprising a variable region of a heavy chain, wherein the light and heavy chain variable regions are contiguously linked, e.g., via a synthetic linker, e.g., a short flexible polypeptide linker, and capable of being expressed as a single chain polypeptide, and wherein the scFv retains the specificity of the intact antibody from which it is derived. Unless specified, as used herein an scFv may have the VL and VH variable regions in either order, e.g., with respect to the N-terminal and C-terminal ends of the polypeptide, the scFv may comprise VL-linker-VH or may comprise VH-linker-VL.

[0211] The portion of the CAR of the invention comprising an antibody or antibody fragment thereof may exist in a variety of forms where the antigen binding domain is expressed as part of a contiguous polypeptide chain including, for example, a single domain antibody fragment (sdAb), a single chain antibody (scFv), a humanized antibody or bispecific antibody (Harlow et al., 1999, In: Using Antibodies: A Laboratory Manual, Cold Spring Harbor Laboratory Press, NY; Harlow et al., 1989, In: Antibodies: A Laboratory Manual, Cold Spring Harbor, N.Y.; Houston et al., 1988, Proc. Natl. Acad. Sci. USA 85:5879-5883; Bird et al., 1988, Science 242:423-426). In one aspect, the antigen binding domain of a CAR composition of the invention comprises an antibody fragment. In a further aspect, the CAR comprises an antibody fragment that comprises a scFv. The precise amino acid sequence boundaries of a given CDR can be determined using any of a number of well-known schemes, including those described by Kabat et al. (1991), “Sequences of Proteins of Immunological Interest,” 5th Ed. Public Health Service, National Institutes of Health, Bethesda, Md. (“Kabat” numbering scheme), Al-Lazikani et al., (1997) JMB 273,927-948 (“Chothia” numbering scheme), or a combination thereof.

[0212] As used herein, the term “binding domain” or “antibody molecule” refers to a protein, e.g., an immunoglobulin chain or fragment thereof, comprising at least one immunoglobulin variable domain sequence. The term “binding domain” or “antibody molecule” encompasses antibodies and antibody fragments. In an embodiment, an antibody molecule is a multispecific antibody molecule, e.g., it comprises a plurality of immunoglobulin variable domain sequences, wherein a first immunoglobulin variable domain sequence of the plurality has binding specificity for a first epitope and a second immunoglobulin variable domain sequence of the plurality has binding specificity for a second epitope. In an embodiment, a multispecific antibody molecule is a bispecific antibody molecule. A bispecific antibody has specificity for no more than two antigens. A bispecific antibody molecule is characterized by a first immunoglobulin variable domain sequence which has binding specificity for a first epitope and a second immunoglobulin variable domain sequence that has binding specificity for a second epitope.

[0213] The portion of the CAR of the invention comprising an antibody or antibody fragment thereof may exist in a variety of forms where the antigen binding domain is expressed as part of a contiguous polypeptide chain including, for example, a single domain antibody fragment (sdAb), a single chain antibody (scFv), a humanized antibody, or bispecific antibody (Harlow et al., 1999, In: Using Antibodies: A Laboratory Manual, Cold Spring Harbor Laboratory Press, NY; Harlow et al., 1989, In: Antibodies: A Laboratory Manual, Cold Spring Harbor, N.Y.; Houston et al., 1988, Proc. Natl. Acad. Sci. USA 85:5879-5883; Bird et al., 1988, Science 242:423-426). In one aspect, the antigen binding domain of a CAR composition of the invention comprises an antibody fragment. In a further aspect, the CAR comprises an antibody fragment that comprises a scFv.

[0214] The term “antibody heavy chain,” refers to the larger of the two types of polypeptide chains present in antibody molecules in their naturally occurring conformations, and which normally determines the class to which the antibody belongs.

[0215] The term “antibody light chain,” refers to the smaller of the two types of polypeptide chains present in antibody molecules in their naturally occurring conformations. Kappa (κ) and lambda (λ) light chains refer to the two major antibody light chain isotypes.

[0216] The term “recombinant antibody” refers to an antibody which is generated using recombinant DNA technology, such as, for example, an antibody expressed by a bacteriophage or yeast expression system. The term should also be construed to mean an antibody which has been generated by the synthesis of a DNA molecule encoding the antibody and which DNA molecule expresses an antibody protein, or an amino acid sequence specifying the antibody, wherein the DNA or amino acid sequence has been obtained using recombinant DNA or amino acid sequence technology which is available and well known in the art.

[0217] The term “antigen” or “Ag” refers to a molecule that provokes an immune response. This immune response may involve either antibody production, or the activation of specific immunologically-competent cells, or both. The skilled artisan will understand that any macromolecule, including virtually all proteins or peptides, can serve as an antigen. Furthermore, antigens can be derived from recombinant or genomic DNA. A skilled artisan will understand that any DNA, which comprises a nucleotide sequences or a partial nucleotide sequence encoding a protein that elicits an immune response therefore encodes an “antigen” as that term is used herein. Furthermore, one skilled in the art will understand that an antigen need not be encoded solely by a full length nucleotide sequence of a gene. It is readily apparent that the present invention includes, but is not limited to, the use of partial nucleotide sequences of more than one gene and that these nucleotide sequences are arranged in various combinations to encode polypeptides that elicit the desired immune response. Moreover, a skilled artisan will understand that an antigen need not be encoded by a “gene” at all. It is readily apparent that an antigen can be generated synthesized or can be derived from a biological sample, or might be macromolecule besides a polypeptide. Such a biological sample can include, but is not limited to a tissue sample, a tumor sample, a cell or a fluid with other biological components.

[0218] The term “anti-cancer effect” refers to a biological effect which can be manifested by various means, including but not limited to, e.g., a decrease in tumor volume, a decrease in the number of cancer cells, a decrease in the number of metastases, an increase in life expectancy, decrease in cancer cell proliferation, decrease in cancer cell survival, or amelioration of various physiological symptoms associated with the cancerous condition. An “anti-cancer effect” can also be manifested by the ability of the peptides, polynucleotides, cells and antibodies in prevention of the occurrence of cancer in the first place. The term “anti-tumor effect” refers to a biological effect which can be manifested by various means, including but not limited to, e.g., a decrease in tumor volume, a decrease in the number of tumor cells, a decrease in tumor cell proliferation, or a decrease in tumor cell survival.

[0219] The term “autologous” refers to any material derived from the same individual to whom it is later to be re-introduced into the individual.

[0220] The term “allogeneic” refers to any material derived from a different animal of the same species as the individual to whom the material is introduced. Two or more individuals are said to be allogeneic to one another when the genes at one or more loci are not identical. In some aspects, allogeneic material from individuals of the same species may be sufficiently unlike genetically to interact antigenically

[0221] The term “xenogeneic” refers to a graft derived from an animal of a different species.

[0222] The term “cancer” refers to a disease characterized by the uncontrolled growth of aberrant cells. Cancer cells can spread locally or through the bloodstream and lymphatic system to other parts of the body. Examples of various cancers are described herein and include but are not limited to, breast cancer, prostate cancer, ovarian cancer, cervical cancer, skin cancer, pancreatic cancer, colorectal cancer, renal cancer, liver cancer, brain cancer, lymphoma, leukemia, lung cancer and the like. The terms “tumor” and “cancer” are used interchangeably herein, e.g., both terms encompass solid and liquid, e.g., diffuse or circulating, tumors. As used herein, the term “cancer” or “tumor” includes premalignant, as well as malignant cancers and tumors.

[0223] “Derived from” as that term is used herein, indicates a relationship between a first and a second molecule. It generally refers to structural similarity between the first molecule and a second molecule and does not connotate or include a process or source limitation on a first molecule that is derived from a second molecule. For example, in the case of an intracellular signaling domain that is derived from a CD3zeta molecule, the intracellular signaling domain retains sufficient CD3zeta structure such that is has the required function, namely, the ability to generate a signal under the appropriate conditions. It does not connotate or include a limitation to a particular process of producing the intracellular signaling domain, e.g., it does not mean that, to provide the intracellular signaling domain, one must start with a CD3zeta sequence and delete unwanted sequence, or impose mutations, to arrive at the intracellular signaling domain.

[0224] The phrase “disease associated with expression of a tumor antigen as described herein” includes, but is not limited to, a disease associated with expression of a tumor antigen as described herein or condition associated with cells which express a tumor antigen as described herein including, e.g., proliferative diseases such as a cancer or malignancy or a precancerous condition such as a myelodysplasia, a myelodysplastic syndrome or a preleukemia; or a noncancer related indication associated with cells which express a tumor antigen as described herein. In one aspect, a cancer associated with expression of a tumor antigen as described herein is a hematological cancer. In one aspect, a cancer associated with expression of a tumor antigen as described herein is a solid cancer. Further diseases associated with expression of a tumor antigen described herein include, but not limited to, e.g., atypical and/or non-classical cancers, malignancies, precancerous conditions or proliferative diseases associated with expression of a tumor antigen as described herein. Non-cancer related indications associated with expression of a tumor antigen as described herein include, but are not limited to, e.g., autoimmune disease, (e.g., lupus), inflammatory disorders (allergy and asthma) and transplantation. In some embodiments, the tumor antigen-expressing cells express, or at any time expressed, mRNA encoding the tumor antigen. In an embodiment, the tumor antigen-expressing cells produce the tumor antigen protein (e.g., wild-type or mutant), and the tumor antigen protein may be present at normal levels or reduced levels. In an embodiment, the tumor antigen-expressing cells produced detectable levels of a tumor antigen protein at one point, and subsequently produced substantially no detectable tumor antigen protein.

[0225] The phrase “disease associated with expression of CD19” includes, but is not limited to, a disease associated with expression of CD19 (e.g., wild-type or mutant CD19) or condition associated with cells which express, or at any time expressed, CD19 (e.g., wild-type or mutant CD19) including, e.g., proliferative diseases such as a cancer or malignancy or a precancerous condition such as a myelodysplasia, a myelodysplastic syndrome or a preleukemia; or a noncancer related indication associated with cells which express CD19. For the avoidance of doubt, a disease associated with expression of CD19 may include a condition associated with cells which do not presently express CD19, e.g., because CD19 expression has been downregulated, e.g., due to treatment with a molecule targeting CD19, e.g., a CD19 CAR, but which at one time expressed CD19. In one aspect, a cancer associated with expression of CD19 is a hematological cancer. In one aspect, the hematological cancer is a leukemia or a lymphoma. In one aspect, a cancer associated with expression of CD19 includes cancers and malignancies including, but not limited to, e.g., one or more acute leukemias including but not limited to, e.g., B-cell acute Lymphoid Leukemia (BALL), T-cell acute Lymphoid Leukemia (TALL), acute lymphoid leukemia (ALL); one or more chronic leukemias including but not limited to, e.g., chronic myelogenous leukemia (CML), Chronic Lymphoid Leukemia (CLL). Additional cancers or hematologic conditions associated with expression of CD19 comprise, but are not limited to, e.g., B cell prolymphocytic leukemia, blastic plasmacytoid dendritic cell neoplasm, Burkitt's lymphoma, diffuse large B cell lymphoma, Follicular lymphoma, Hairy cell leukemia, small cell- or a large cell-follicular lymphoma, malignant lymphoproliferative conditions, MALT lymphoma, mantle cell lymphoma (MCL), Marginal zone lymphoma, multiple myeloma, myelodysplasia and myelodysplastic syndrome, non-Hodgkin lymphoma, Hodgkin lymphoma, plasmablastic lymphoma, plasmacytoid dendritic cell neoplasm, Waldenstrom macroglobulinemia, and “preleukemia” which are a diverse collection of hematological conditions united by ineffective production (or dysplasia) of myeloid blood cells, and the like. Further diseases associated with expression of CD19 expression include, but not limited to, e.g., atypical and/or non-classical cancers, malignancies, precancerous conditions or proliferative diseases associated with expression of CD19. Non-cancer related indications associated with expression of CD19 include, but are not limited to, e.g., autoimmune disease, (e.g., lupus), inflammatory disorders (allergy and asthma) and transplantation. In some embodiments, the CD19-expressing cells express, or at any time expressed, CD19 mRNA. In an embodiment, the CD19-expressing cells produce a CD19 protein (e.g., wild-type or mutant), and the CD19 protein may be present at normal levels or reduced levels. In an embodiment, the CD19-expressing cells produced detectable levels of a CD19 protein at one point, and subsequently produced substantially no detectable CD19 protein.

[0226] The term “disease associated with expression of a target CAR” as used herein includes but is not limited to a disease associated with expression of a target CAR, e.g., a target CAR as described herein, e.g., a CD19 CAR, or condition associated with cells which express a target CAR, e.g., a target CAR as described herein, e.g., a CD19 CAR, including, e.g., proliferative diseases such as a cancer or malignancy, a precancerous condition such as a myelodysplasia, a myelodysplastic syndrome or a preleukemia; or a noncancer related indication, e.g., B cell aplasia, associated with cells which express the target CAR. In one aspect, a disease associated with a target CAR, e.g., a target CAR described herein, is a solid cancer, e.g., a solid cancer described herein. In one aspect, a disease associated with a target CAR, e.g., a CD19 CAR, is a hematological cancer. In one aspect, the hematological cancer is a leukemia or a lymphoma. In one aspect, a disease associated with expression of a target CAR, e.g., a CD19 CAR, includes cancers and malignancies including, but not limited to, e.g., one or more acute leukemias including but not limited to, e.g., B-cell acute Lymphoid Leukemia (BALL), T-cell acute Lymphoid Leukemia (TALL), acute lymphoid leukemia (ALL); one or more chronic leukemias including but not limited to, e.g., chronic myelogenous leukemia (CML), Chronic Lymphoid Leukemia (CLL). Additional cancers or hematologic conditions associated with expression of CD19 comprise, but are not limited to, e.g., B cell prolymphocytic leukemia, blastic plasmacytoid dendritic cell neoplasm, Burkitt's lymphoma, diffuse large B cell lymphoma, Follicular lymphoma, Hairy cell leukemia, small cell- or a large cell-follicular lymphoma, malignant lymphoproliferative conditions, MALT lymphoma, mantle cell lymphoma (MCL), Marginal zone lymphoma, multiple myeloma, myelodysplasia and myelodysplastic syndrome, non-Hodgkin lymphoma, Hodgkin lymphoma, plasmablastic lymphoma, plasmacytoid dendritic cell neoplasm, Waldenstrom macroglobulinemia, and “preleukemia” which are a diverse collection of hematological conditions united by ineffective production (or dysplasia) of myeloid blood cells, and the like. Further diseases associated with expression of a target CAR, e.g., a CD19 CAR, include, but are not limited to, e.g., atypical and/or non-classical cancers, malignancies, precancerous conditions or proliferative diseases. Non-cancer related indications associated with expression of a target CAR, e.g., a CD19 CAR, include, but are not limited to, e.g., immune-related disorder, e.g., B cell aplasia; autoimmune disease, (e.g., lupus); inflammatory disorders (allergy and asthma) and transplantation.

[0227] The term “conservative sequence modifications” refers to amino acid modifications that do not significantly affect or alter the binding characteristics of the antibody or antibody fragment containing the amino acid sequence. Such conservative modifications include amino acid substitutions, additions and deletions. Modifications can be introduced into an antibody or antibody fragment of the invention by standard techniques known in the art, such as site-directed mutagenesis and PCR-mediated mutagenesis. Conservative amino acid substitutions are ones in which the amino acid residue is replaced with an amino acid residue having a similar side chain. Families of amino acid residues having similar side chains have been defined in the art. These families include amino acids with basic side chains (e.g., lysine, arginine, histidine), acidic side chains (e.g., aspartic acid, glutamic acid), uncharged polar side chains (e.g., glycine, asparagine, glutamine, serine, threonine, tyrosine, cysteine, tryptophan), nonpolar side chains (e.g., alanine, valine, leucine, isoleucine, proline, phenylalanine, methionine), beta-branched side chains (e.g., threonine, valine, isoleucine) and aromatic side chains (e.g., tyrosine, phenylalanine, tryptophan, histidine). Thus, one or more amino acid residues within a CAR of the invention can be replaced with other amino acid residues from the same side chain family and the altered CAR can be tested using the functional assays described herein.

[0228] The term “stimulation,” refers to a primary response induced by binding of a stimulatory molecule (e.g., a TCR/CD3 complex or CAR) with its cognate ligand (or tumor antigen in the case of a CAR) thereby mediating a signal transduction event, such as, but not limited to, signal transduction via the TCR/CD3 complex or signal transduction via the appropriate NK receptor or signaling domains of the CAR. Stimulation can mediate altered expression of certain molecules.

[0229] The term “stimulatory molecule,” refers to a molecule expressed by an immune cell (e.g., T cell, NK cell, B cell) that provides the cytoplasmic signaling sequence(s) that regulate activation of the immune cell in a stimulatory way for at least some aspect of the immune cell signaling pathway. In one aspect, the signal is a primary signal that is initiated by, for instance, binding of a TCR/CD3 complex with an MHC molecule loaded with peptide, and which leads to mediation of a T cell response, including, but not limited to, proliferation, activation, differentiation, and the like. A primary cytoplasmic signaling sequence (also referred to as a “primary signaling domain”) that acts in a stimulatory manner may contain a signaling motif which is known as immunoreceptor tyrosine-based activation motif or ITAM. Examples of an ITAM containing cytoplasmic signaling sequence that is of particular use in the invention includes, but is not limited to, those derived from CD3 zeta, common FcR gamma (FCER1G), Fc gamma RIIa, FcR beta (Fc Epsilon Rib), CD3 gamma, CD3 delta, CD3 epsilon, CD79a, CD79b, DAP10, and DAP12. In a specific CAR of the invention, the intracellular signaling domain in any one or more CARS of the invention comprises an intracellular signaling sequence, e.g., a primary signaling sequence of CD3-zeta. In a specific CAR of the invention, the primary signaling sequence of CD3-zeta is the sequence provided as SEQ ID NO:18, or the equivalent residues from a non-human species, e.g., mouse, rodent, monkey, ape and the like. In a specific CAR of the invention, the primary signaling sequence of CD3-zeta is the sequence as provided in SEQ ID NO:20, or the equivalent residues from a non-human species, e.g., mouse, rodent, monkey, ape and the like.

[0230] The term “antigen presenting cell” or “APC” refers to an immune system cell such as an accessory cell (e.g., a B-cell, a dendritic cell, and the like) that displays a foreign antigen complexed with major histocompatibility complexes (MHC's) on its surface. T-cells may recognize these complexes using their T-cell receptors (TCRs). APCs process antigens and present them to T-cells.

[0231] An “intracellular signaling domain,” as the term is used herein, refers to an intracellular portion of a molecule. The intracellular signaling domain generates a signal that promotes an immune effector function of the CAR containing cell, e.g., a CART cell. Examples of immune effector function, e.g., in a CART cell, include cytolytic activity and helper activity, including the secretion of cytokines.

[0232] In an embodiment, the intracellular signaling domain can comprise a primary intracellular signaling domain. Exemplary primary intracellular signaling domains include those derived from the molecules responsible for primary stimulation, or antigen dependent simulation. In an embodiment, the intracellular signaling domain can comprise a costimulatory intracellular domain. Exemplary costimulatory intracellular signaling domains include those derived from molecules responsible for costimulatory signals, or antigen independent stimulation. For example, in the case of a CART, a primary intracellular signaling domain can comprise a cytoplasmic sequence of a T cell receptor, and a costimulatory intracellular signaling domain can comprise cytoplasmic sequence from co-receptor or costimulatory molecule.

[0233] A primary intracellular signaling domain can comprise a signaling motif which is known as an immunoreceptor tyrosine-based activation motif or ITAM. Examples of ITAM containing primary cytoplasmic signaling sequences include, but are not limited to, those derived from CD3 zeta, common FcR gamma (FCER1G), Fc gamma RIIa, FcR beta (Fc Epsilon Rib), CD3 gamma, CD3 delta, CD3 epsilon, CD79a, CD79b, DAP10, and DAP12.

[0234] The term “zeta” or alternatively “zeta chain”, “CD3-zeta” or “TCR-zeta” is defined as the protein provided as GenBank Acc. No. BAG36664.1, or the equivalent residues from a non-human species, e.g., mouse, rodent, monkey, ape and the like, and a “zeta stimulatory domain” or alternatively a “CD3-zeta stimulatory domain” or a “TCR-zeta stimulatory domain” is defined as the amino acid residues from the cytoplasmic domain of the zeta chain, or functional derivatives thereof, that are sufficient to functionally transmit an initial signal necessary for T cell activation. In one aspect the cytoplasmic domain of zeta comprises residues 52 through 164 of GenBank Acc. No. BAG36664.1 or the equivalent residues from a non-human species, e.g., mouse, rodent, monkey, ape and the like, that are functional orthologs thereof. In one aspect, the “zeta stimulatory domain” or a “CD3-zeta stimulatory domain” is the sequence provided as SEQ ID NO:18. In one aspect, the “zeta stimulatory domain” or a “CD3-zeta stimulatory domain” is the sequence provided as SEQ ID NO:20.

[0235] The term a “costimulatory molecule” refers to a cognate binding partner on a T cell that specifically binds with a costimulatory ligand, thereby mediating a costimulatory response by the T cell, such as, but not limited to, proliferation. Costimulatory molecules are cell surface molecules other than antigen receptors or their ligands that are contribute to an efficient immune response. Costimulatory molecules include, but are not limited to an MHC class I molecule, BTLA and a Toll ligand receptor, as well as OX40, CD27, CD28, CDS, ICAM-1, LFA-1 (CD11a/CD18), ICOS (CD278), and 4-1BB (CD137). Further examples of such costimulatory molecules include CDS, ICAM-1, GITR, BAFFR, HVEM (LIGHTR), SLAMF7, NKp80 (KLRF1), NKp44, NKp30, NKp46, CD160, CD19, CD4, CD8alpha, CD8beta, IL2R beta, IL2R gamma, IL7R alpha, ITGA4, VLA1, CD49a, ITGA4, IA4, CD49D, ITGA6, VLA-6, CD49f, ITGAD, CD11d, ITGAE, CD103, ITGAL, CD11a, LFA-1, ITGAM, CD11b, ITGAX, CD11c, ITGB1, CD29, ITGB2, CD18, LFA-1, ITGB7, NKG2D, NKG2C, TNFR2, TRANCE/RANKL, DNAM1 (CD226), SLAMF4 (CD244, 2B4), CD84, CD96 (Tactile), CEACAM1, CRTAM, Ly9 (CD229), CD160 (BY55), PSGL1, CD100 (SEMA4D), CD69, SLAMF6 (NTB-A, Ly108), SLAM (SLAMF1, CD150, IPO-3), BLAME (SLAMF8), SELPLG (CD162), LTBR, LAT, GADS, SLP-76, PAG/Cbp, CD19a, and a ligand that specifically binds with CD83.

[0236] A costimulatory intracellular signaling domain can be the intracellular portion of a costimulatory molecule. A costimulatory molecule can be represented in the following protein families: TNF receptor proteins, Immunoglobulin-like proteins, cytokine receptors, integrins, signaling lymphocytic activation molecules (SLAM proteins), and activating NK cell receptors. Examples of such molecules include CD27, CD28, 4-1BB (CD137), OX40, GITR, CD30, CD40, ICOS, BAFFR, HVEM, ICAM-1, lymphocyte function-associated antigen-1 (LFA-1), CD2, CDS, CD7, CD287, LIGHT, NKG2C, NKG2D, SLAMF7, NKp80, NKp30, NKp44, NKp46, CD160, B7-H3, and a ligand that specifically binds with CD83, and the like.

[0237] The intracellular signaling domain can comprise the entire intracellular portion, or the entire native intracellular signaling domain, of the molecule from which it is derived, or a functional fragment or derivative thereof.

[0238] The term “4-1BB” refers to a member of the TNFR superfamily with an amino acid sequence provided as GenBank Acc. No. AAA62478.2, or the equivalent residues from a non-human species, e.g., mouse, rodent, monkey, ape and the like; and a “4-1BB costimulatory domain” is defined as amino acid residues 214-255 of GenBank Acc. No. AAA62478.2, or the equivalent residues from a non-human species, e.g., mouse, rodent, monkey, ape and the like. In one aspect, the “4-1BB costimulatory domain” is the sequence provided as SEQ ID NO:14 or the equivalent residues from a non-human species, e.g., mouse, rodent, monkey, ape and the like.

[0239] “Immune effector cell,” as that term is used herein, refers to a cell that is involved in an immune response, e.g., in the promotion of an immune effector response. Examples of immune effector cells include T cells, e.g., alpha/beta T cells and gamma/delta T cells, B cells, natural killer (NK) cells, natural killer T (NKT) cells, mast cells, and myeloid-derived phagocytes.

[0240] “Immune effector function or immune effector response,” as that term is used herein, refers to function or response, e.g., of an immune effector cell, that enhances or promotes an immune attack of a target cell. E.g., an immune effector function or response refers a property of a T or NK cell that promotes killing or the inhibition of growth or proliferation, of a target cell. In the case of a T cell, primary stimulation and co-stimulation are examples of immune effector function or response.

[0241] The term “encoding” refers to the inherent property of specific sequences of nucleotides in a polynucleotide, such as a gene, a cDNA, or an mRNA, to serve as templates for synthesis of other polymers and macromolecules in biological processes having either a defined sequence of nucleotides (e.g., rRNA, tRNA and mRNA) or a defined sequence of amino acids and the biological properties resulting therefrom. Thus, a gene, cDNA, or RNA, encodes a protein if transcription and translation of mRNA corresponding to that gene produces the protein in a cell or other biological system. Both the coding strand, the nucleotide sequence of which is identical to the mRNA sequence and is usually provided in sequence listings, and the non-coding strand, used as the template for transcription of a gene or cDNA, can be referred to as encoding the protein or other product of that gene or cDNA.

[0242] Unless otherwise specified, a “nucleotide sequence encoding an amino acid sequence” includes all nucleotide sequences that are degenerate versions of each other and that encode the same amino acid sequence. The phrase nucleotide sequence that encodes a protein or a RNA may also include introns to the extent that the nucleotide sequence encoding the protein may in some version contain an intron(s).

[0243] The term “effective amount” or “therapeutically effective amount” are used interchangeably herein, and refer to an amount of a compound, formulation, material, or composition, as described herein effective to achieve a particular biological result.

[0244] The term “endogenous” refers to any material from or produced inside an organism, cell, tissue or system.

[0245] The term “exogenous” refers to any material introduced from or produced outside an organism, cell, tissue or system.

[0246] The term “expression” refers to the transcription and/or translation of a particular nucleotide sequence driven by a promoter.

[0247] The term “transfer vector” refers to a composition of matter which comprises an isolated nucleic acid and which can be used to deliver the isolated nucleic acid to the interior of a cell. Numerous vectors are known in the art including, but not limited to, linear polynucleotides, polynucleotides associated with ionic or amphiphilic compounds, plasmids, and viruses. Thus, the term “transfer vector” includes an autonomously replicating plasmid or a virus. The term should also be construed to further include non-plasmid and non-viral compounds which facilitate transfer of nucleic acid into cells, such as, for example, a polylysine compound, liposome, and the like. Examples of viral transfer vectors include, but are not limited to, adenoviral vectors, adeno-associated virus vectors, retroviral vectors, lentiviral vectors, and the like.

[0248] The term “expression vector” refers to a vector comprising a recombinant polynucleotide comprising expression control sequences operatively linked to a nucleotide sequence to be expressed. An expression vector comprises sufficient cis-acting elements for expression; other elements for expression can be supplied by the host cell or in an in vitro expression system. Expression vectors include all those known in the art, including cosmids, plasmids (e.g., naked or contained in liposomes) and viruses (e.g., lentiviruses, retroviruses, adenoviruses, and adeno-associated viruses) that incorporate the recombinant polynucleotide.

[0249] The term “lentivirus” refers to a genus of the Retroviridae family Lentiviruses are unique among the retroviruses in being able to infect non-dividing cells; they can deliver a significant amount of genetic information into the DNA of the host cell, so they are one of the most efficient methods of a gene delivery vector. HIV, SIV, and FIV are all examples of lentiviruses.

[0250] The term “lentiviral vector” refers to a vector derived from at least a portion of a lentivirus genome, including especially a self-inactivating lentiviral vector as provided in Milone et al., Mol. Ther. 17(8): 1453-1464 (2009). Other examples of lentivirus vectors that may be used in the clinic, include but are not limited to, e.g., the LENTIVECTOR® gene delivery technology from Oxford BioMedica, the LENTIMAX™ vector system from Lentigen and the like. Nonclinical types of lentiviral vectors are also available and would be known to one skilled in the art.

[0251] The term “homologous” or “identity” refers to the subunit sequence identity between two polymeric molecules, e.g., between two nucleic acid molecules, such as, two DNA molecules or two RNA molecules, or between two polypeptide molecules. When a subunit position in both of the two molecules is occupied by the same monomeric subunit; e.g., if a position in each of two DNA molecules is occupied by adenine, then they are homologous or identical at that position. The homology between two sequences is a direct function of the number of matching or homologous positions; e.g., if half (e.g., five positions in a polymer ten subunits in length) of the positions in two sequences are homologous, the two sequences are 50% homologous; if 90% of the positions (e.g., 9 of 10), are matched or homologous, the two sequences are 90% homologous.

[0252] “Humanized” forms of non-human (e.g., murine) antibodies are chimeric immunoglobulins, immunoglobulin chains or fragments thereof (such as Fv, Fab, Fab′, F(ab′)2 or other antigen-binding subsequences of antibodies) which contain minimal sequence derived from non-human immunoglobulin. For the most part, humanized antibodies and antibody fragments thereof are human immunoglobulins (recipient antibody or antibody fragment) in which residues from a complementary-determining region (CDR) of the recipient are replaced by residues from a CDR of a non-human species (donor antibody) such as mouse, rat or rabbit having the desired specificity, affinity, and capacity. In some instances, Fv framework region (FR) residues of the human immunoglobulin are replaced by corresponding non-human residues. Furthermore, a humanized antibody/antibody fragment can comprise residues which are found neither in the recipient antibody nor in the imported CDR or framework sequences. These modifications can further refine and optimize antibody or antibody fragment performance In general, the humanized antibody or antibody fragment thereof will comprise substantially all of at least one, and typically two, variable domains, in which all or substantially all of the CDR regions correspond to those of a non-human immunoglobulin and all or a significant portion of the FR regions are those of a human immunoglobulin sequence. The humanized antibody or antibody fragment can also comprise at least a portion of an immunoglobulin constant region (Fc), typically that of a human immunoglobulin. For further details, see Jones et al., Nature, 321: 522-525, 1986; Reichmann et al., Nature, 332: 323-329, 1988; Presta, Curr. Op. Struct. Biol., 2: 593-596, 1992.

[0253] “Fully human” refers to an immunoglobulin, such as an antibody or antibody fragment, where the whole molecule is of human origin or consists of an amino acid sequence identical to a human form of the antibody or immunoglobulin.

[0254] The term “isolated” means altered or removed from the natural state. For example, a nucleic acid or a peptide naturally present in a living animal is not “isolated,” but the same nucleic acid or peptide partially or completely separated from the coexisting materials of its natural state is “isolated.” An isolated nucleic acid or protein can exist in substantially purified form, or can exist in a non-native environment such as, for example, a host cell.

[0255] In the context of the present invention, the following abbreviations for the commonly occurring nucleic acid bases are used. “A” refers to adenosine, “C” refers to cytosine, “G” refers to guanosine, “T” refers to thymidine, and “U” refers to uridine.

[0256] The term “operably linked” or “transcriptional control” refers to functional linkage between a regulatory sequence and a heterologous nucleic acid sequence resulting in expression of the latter. For example, a first nucleic acid sequence is operably linked with a second nucleic acid sequence when the first nucleic acid sequence is placed in a functional relationship with the second nucleic acid sequence. For instance, a promoter is operably linked to a coding sequence if the promoter affects the transcription or expression of the coding sequence. Operably linked DNA sequences can be contiguous with each other and, e.g., where necessary to join two protein coding regions, are in the same reading frame.

[0257] The term “parenteral” administration of an immunogenic composition includes, e.g., subcutaneous (s.c.), intravenous (i.v.), intramuscular (i.m.), or intrasternal injection, intratumoral, or infusion techniques.

[0258] The term “nucleic acid” or “polynucleotide” refers to deoxyribonucleic acids (DNA) or ribonucleic acids (RNA) and polymers thereof in either single- or double-stranded form. Unless specifically limited, the term encompasses nucleic acids containing known analogues of natural nucleotides that have similar binding properties as the reference nucleic acid and are metabolized in a manner similar to naturally occurring nucleotides. Unless otherwise indicated, a particular nucleic acid sequence also implicitly encompasses conservatively modified variants thereof (e.g., degenerate codon substitutions), alleles, orthologs, SNPs, and complementary sequences as well as the sequence explicitly indicated. Specifically, degenerate codon substitutions may be achieved by generating sequences in which the third position of one or more selected (or all) codons is substituted with mixed-base and/or deoxyinosine residues (Batzer et al., Nucleic Acid Res. 19:5081 (1991); Ohtsuka et al., J. Biol. Chem. 260:2605-2608 (1985); and Rossolini et al., Mol. Cell. Probes 8:91-98 (1994)).

[0259] The terms “peptide,” “polypeptide,” and “protein” are used interchangeably, and refer to a compound comprised of amino acid residues covalently linked by peptide bonds. A protein or peptide must contain at least two amino acids, and no limitation is placed on the maximum number of amino acids that can comprise a protein's or peptide's sequence. Polypeptides include any peptide or protein comprising two or more amino acids joined to each other by peptide bonds. As used herein, the term refers to both short chains, which also commonly are referred to in the art as peptides, oligopeptides and oligomers, for example, and to longer chains, which generally are referred to in the art as proteins, of which there are many types. “Polypeptides” include, for example, biologically active fragments, substantially homologous polypeptides, oligopeptides, homodimers, heterodimers, variants of polypeptides, modified polypeptides, derivatives, analogs, fusion proteins, among others. A polypeptide includes a natural peptide, a recombinant peptide, or a combination thereof.

[0260] The term “promoter” refers to a DNA sequence recognized by the synthetic machinery of the cell, or introduced synthetic machinery, required to initiate the specific transcription of a polynucleotide sequence.

[0261] The term “promoter/regulatory sequence” refers to a nucleic acid sequence which is required for expression of a gene product operably linked to the promoter/regulatory sequence. In some instances, this sequence may be the core promoter sequence and in other instances, this sequence may also include an enhancer sequence and other regulatory elements which are required for expression of the gene product. The promoter/regulatory sequence may, for example, be one which expresses the gene product in a tissue specific manner.

[0262] The term “constitutive” promoter refers to a nucleotide sequence which, when operably linked with a polynucleotide which encodes or specifies a gene product, causes the gene product to be produced in a cell under most or all physiological conditions of the cell.

[0263] The term “inducible” promoter refers to a nucleotide sequence which, when operably linked with a polynucleotide which encodes or specifies a gene product, causes the gene product to be produced in a cell substantially only when an inducer which corresponds to the promoter is present in the cell.

[0264] The term “tissue-specific” promoter refers to a nucleotide sequence which, when operably linked with a polynucleotide encodes or specified by a gene, causes the gene product to be produced in a cell substantially only if the cell is a cell of the tissue type corresponding to the promoter.

[0265] The terms “cancer associated antigen” or “tumor antigen” interchangeably refers to a molecule (typically a protein, carbohydrate or lipid) that is expressed on the surface of a cancer cell, either entirely or as a fragment (e.g., MHC/peptide), and which is useful for the preferential targeting of a pharmacological agent to the cancer cell. In some embodiments, a tumor antigen is a marker expressed by both normal cells and cancer cells, e.g., a lineage marker, e.g., CD19 on B cells. In some embodiments, a tumor antigen is a cell surface molecule that is overexpressed in a cancer cell in comparison to a normal cell, for instance, 1-fold over expression, 2-fold overexpression, 3-fold overexpression or more in comparison to a normal cell. In some embodiments, a tumor antigen is a cell surface molecule that is inappropriately synthesized in the cancer cell, for instance, a molecule that contains deletions, additions or mutations in comparison to the molecule expressed on a normal cell. In some embodiments, a tumor antigen will be expressed exclusively on the cell surface of a cancer cell, entirely or as a fragment (e.g., MHC/peptide), and not synthesized or expressed on the surface of a normal cell. In some embodiments, the CARs of the present invention includes CARs comprising an antigen binding domain (e.g., antibody or antibody fragment) that binds to a MHC presented peptide. Normally, peptides derived from endogenous proteins fill the pockets of Major histocompatibility complex (MHC) class I molecules, and are recognized by T cell receptors (TCRs) on CD8+T lymphocytes. The MHC class I complexes are constitutively expressed by all nucleated cells. In cancer, virus-specific and/or tumor-specific peptide/MHC complexes represent a unique class of cell surface targets for immunotherapy. TCR-like antibodies targeting peptides derived from viral or tumor antigens in the context of human leukocyte antigen (HLA)-A1 or HLA-A2 have been described (see, e.g., Sastry et al., J Virol. 2011 85(5):1935-1942; Sergeeva et al., Blood, 2011 117(16):4262-4272; Verma et al., J Immunol 2010 184(4):2156-2165; Willemsen et al., Gene Ther 2001 8(21):1601-1608; Dao et al., Sci Transl Med 2013 5(176):176ra33; Tassev et al., Cancer Gene Ther 2012 19(2):84-100). For example, TCR-like antibody can be identified from screening a library, such as a human scFv phage displayed library.

[0266] The term “tumor-supporting antigen” or “cancer-supporting antigen” interchangeably refer to a molecule (typically a protein, carbohydrate or lipid) that is expressed on the surface of a cell that is, itself, not cancerous, but supports the cancer cells, e.g., by promoting their growth or survival e.g., resistance to immune cells. Exemplary cells of this type include stromal cells and myeloid-derived suppressor cells (MDSCs). The tumor-supporting antigen itself need not play a role in supporting the tumor cells so long as the antigen is present on a cell that supports cancer cells.

[0267] The term “flexible polypeptide linker” or “linker” as used in the context of a scFv refers to a peptide linker that consists of amino acids such as glycine and/or serine residues used alone or in combination, to link variable heavy and variable light chain regions together. In one embodiment, the flexible polypeptide linker is a Gly/Ser linker and comprises the amino acid sequence (Gly-Gly-Gly-Ser)ₙ, where n is a positive integer equal to or greater than 1. For example, n=1, n=2, n=3. n=4, n=5 and n=6, n=7, n=8, n=9 and n=10 (SEQ ID NO:28). In one embodiment, the flexible polypeptide linkers include, but are not limited to, (Gly₄ Ser)₄ (SEQ ID NO:29) or (Gly₄ Ser)₃ (SEQ ID NO:30). In another embodiment, the linkers include multiple repeats of (Gly₂Ser), (GlySer) or (Gly₃Ser) (SEQ ID NO:31). Also included within the scope of the invention are linkers described in WO2012/138475, incorporated herein by reference).

[0268] As used herein, a 5′ cap (also termed an RNA cap, an RNA 7-methylguanosine cap or an RNA m⁷G cap) is a modified guanine nucleotide that has been added to the “front” or 5′ end of a eukaryotic messenger RNA shortly after the start of transcription. The 5′ cap consists of a terminal group which is linked to the first transcribed nucleotide. Its presence is critical for recognition by the ribosome and protection from RNases. Cap addition is coupled to transcription, and occurs co-transcriptionally, such that each influences the other. Shortly after the start of transcription, the 5′ end of the mRNA being synthesized is bound by a cap-synthesizing complex associated with RNA polymerase. This enzymatic complex catalyzes the chemical reactions that are required for mRNA capping. Synthesis proceeds as a multi-step biochemical reaction. The capping moiety can be modified to modulate functionality of mRNA such as its stability or efficiency of translation.

[0269] As used herein, “in vitro transcribed RNA” refers to RNA, preferably mRNA, that has been synthesized in vitro. Generally, the in vitro transcribed RNA is generated from an in vitro transcription vector. The in vitro transcription vector comprises a template that is used to generate the in vitro transcribed RNA.

[0270] As used herein, a “poly(A)” is a series of adenosines attached by polyadenylation to the mRNA. In the preferred embodiment of a construct for transient expression, the polyA is between 50 and 5000 (SEQ ID NO: 34), preferably greater than 64, more preferably greater than 100, most preferably greater than 300 or 400. poly(A) sequences can be modified chemically or enzymatically to modulate mRNA functionality such as localization, stability or efficiency of translation.

[0271] As used herein, “polyadenylation” refers to the covalent linkage of a polyadenylyl moiety, or its modified variant, to a messenger RNA molecule. In eukaryotic organisms, most messenger RNA (mRNA) molecules are polyadenylated at the 3′ end. The 3′ poly(A) tail is a long sequence of adenine nucleotides (often several hundred) added to the pre-mRNA through the action of an enzyme, polyadenylate polymerase. In higher eukaryotes, the poly(A) tail is added onto transcripts that contain a specific sequence, the polyadenylation signal. The poly(A) tail and the protein bound to it aid in protecting mRNA from degradation by exonucleases. Polyadenylation is also important for transcription termination, export of the mRNA from the nucleus, and translation. Polyadenylation occurs in the nucleus immediately after transcription of DNA into RNA, but additionally can also occur later in the cytoplasm. After transcription has been terminated, the mRNA chain is cleaved through the action of an endonuclease complex associated with RNA polymerase. The cleavage site is usually characterized by the presence of the base sequence AAUAAA near the cleavage site. After the mRNA has been cleaved, adenosine residues are added to the free 3′ end at the cleavage site.

[0272] As used herein, “transient” refers to expression of a non-integrated transgene for a period of hours, days or weeks, wherein the period of time of expression is less than the period of time for expression of the gene if integrated into the genome or contained within a stable plasmid replicon in the host cell.

[0273] As used herein, the terms “treat”, “treatment” and “treating” refer to the reduction or amelioration of the progression, severity and/or duration of a proliferative disorder, or the amelioration of one or more symptoms (preferably, one or more discernible symptoms) of a proliferative disorder resulting from the administration of one or more therapies (e.g., one or more therapeutic agents such as a CAR of the invention). In specific embodiments, the terms “treat”, “treatment” and “treating” refer to the amelioration of at least one measurable physical parameter of a proliferative disorder, such as growth of a tumor, not necessarily discernible by the patient. In other embodiments the terms “treat”, “treatment” and “treating”-refer to the inhibition of the progression of a proliferative disorder, either physically by, e.g., stabilization of a discernible symptom, physiologically by, e.g., stabilization of a physical parameter, or both. In other embodiments the terms “treat”, “treatment” and “treating” refer to the reduction or stabilization of tumor size or cancerous cell count.

[0274] The term “signal transduction pathway” refers to the biochemical relationship between a variety of signal transduction molecules that play a role in the transmission of a signal from one portion of a cell to another portion of a cell. The phrase “cell surface receptor” includes molecules and complexes of molecules capable of receiving a signal and transmitting signal across the membrane of a cell.

[0275] The term “subject” is intended to include living organisms in which an immune response can be elicited “(e.g., mammals, human)” The term, a “substantially purified” cell refers to a cell that is essentially free of other cell types. A substantially purified cell also refers to a cell which has been separated from other cell types with which it is normally associated in its naturally occurring state. In some instances, a population of substantially purified cells refers to a homogenous population of cells. In other instances, this term refers simply to cell that have been separated from the cells with which they are naturally associated in their natural state. In some aspects, the cells are cultured in vitro. In other aspects, the cells are not cultured in vitro.

[0276] The term “therapeutic” as used herein means a treatment. A therapeutic effect is obtained by reduction, suppression, remission, or eradication of a disease state.

[0277] The term “prophylaxis” as used herein means the prevention of or protective treatment for a disease or disease state.

[0278] In the context of the present invention, “tumor antigen” or “hyperproliferative disorder antigen” or “antigen associated with a hyperproliferative disorder” refers to antigens that are common to specific hyperproliferative disorders. In certain aspects, the hyperproliferative disorder antigens of the present invention are derived from, cancers including but not limited to primary or metastatic melanoma, thymoma, lymphoma, sarcoma, lung cancer, liver cancer, non-Hodgkin lymphoma, Hodgkin lymphoma, leukemias, uterine cancer, cervical cancer, bladder cancer, kidney cancer and adenocarcinomas such as breast cancer, prostate cancer, ovarian cancer, pancreatic cancer, and the like.

[0279] The term “transfected” or “transformed” or “transduced” refers to a process by which exogenous nucleic acid is transferred or introduced into the host cell. A “transfected” or “transformed” or “transduced” cell is one which has been transfected, transformed or transduced with exogenous nucleic acid. The cell includes the primary subject cell and its progeny.

[0280] The term “specifically binds,” refers to an antibody, or a ligand, which recognizes and binds with a binding partner (e.g., a tumor antigen) protein present in a sample, but which antibody or ligand does not substantially recognize or bind other molecules in the sample.

[0281] “Regulatable chimeric antigen receptor (RCAR),” as that term is used herein, refers to a set of polypeptides, typically two in the simplest embodiments, which when in a RCARX cell, provides the RCARX cell with specificity for a target cell, typically a cancer cell, and with regulatable intracellular signal generation or proliferation, which can optimize an immune effector property of the RCARX cell. An RCARX cell relies at least in part, on an antigen binding domain to provide specificity to a target cell that comprises the antigen bound by the antigen binding domain. In an embodiment, an RCAR includes a dimerization switch that, upon the presence of a dimerization molecule, can couple an intracellular signaling domain to the antigen binding domain.

[0282] “Membrane anchor” or “membrane tethering domain”, as that term is used herein, refers to a polypeptide or moiety, e.g., a myristoyl group, sufficient to anchor an extracellular or intracellular domain to the plasma membrane.

[0283] “Switch domain,” as that term is used herein, e.g., when referring to an RCAR, refers to an entity, typically a polypeptide-based entity, that, in the presence of a dimerization molecule, associates with another switch domain. The association results in a functional coupling of a first entity linked to, e.g., fused to, a first switch domain, and a second entity linked to, e.g., fused to, a second switch domain. A first and second switch domain are collectively referred to as a dimerization switch. In embodiments, the first and second switch domains are the same as one another, e.g., they are polypeptides having the same primary amino acid sequence, and are referred to collectively as a homodimerization switch. In embodiments, the first and second switch domains are different from one another, e.g., they are polypeptides having different primary amino acid sequences, and are referred to collectively as a heterodimerization switch. In embodiments, the switch is intracellular. In embodiments, the switch is extracellular. In embodiments, the switch domain is a polypeptide-based entity, e.g., FKBP or FRB-based, and the dimerization molecule is small molecule, e.g., a rapalogue. In embodiments, the switch domain is a polypeptide-based entity, e.g., an scFv that binds a myc peptide, and the dimerization molecule is a polypeptide, a fragment thereof, or a multimer of a polypeptide, e.g., a myc ligand or multimers of a myc ligand that bind to one or more myc scFvs. In embodiments, the switch domain is a polypeptide-based entity, e.g., myc receptor, and the dimerization molecule is an antibody or fragments thereof, e.g., myc antibody.

[0284] “Dimerization molecule,” as that term is used herein, e.g., when referring to an RCAR, refers to a molecule that promotes the association of a first switch domain with a second switch domain. In embodiments, the dimerization molecule does not naturally occur in the subject, or does not occur in concentrations that would result in significant dimerization. In embodiments, the dimerization molecule is a small molecule, e.g., rapamycin or a rapalogue, e.g., RAD001.

[0285] The term “bioequivalent” refers to an amount of an agent other than the reference compound (e.g., RAD001), required to produce an effect equivalent to the effect produced by the reference dose or reference amount of the reference compound (e.g., RAD001). In an embodiment the effect is the level of mTOR inhibition, e.g., as measured by P70 S6 kinase inhibition, e.g., as evaluated in an in vivo or in vitro assay, e.g., as measured by an assay described herein, e.g., the Boulay assay. In an embodiment, the effect is alteration of the ratio of PD-1 positive/PD-1 negative T cells, as measured by cell sorting. In an embodiment a bioequivalent amount or dose of an mTOR inhibitor is the amount or dose that achieves the same level of P70 S6 kinase inhibition as does the reference dose or reference amount of a reference compound. In an embodiment, a bioequivalent amount or dose of an mTOR inhibitor is the amount or dose that achieves the same level of alteration in the ratio of PD-1 positive/PD-1 negative T cells as does the reference dose or reference amount of a reference compound.

[0286] The term “low, immune enhancing, dose” when used in conjunction with an mTOR inhibitor, e.g., an allosteric mTOR inhibitor, e.g., RAD001 or rapamycin, or a catalytic mTOR inhibitor, refers to a dose of mTOR inhibitor that partially, but not fully, inhibits mTOR activity, e.g., as measured by the inhibition of P70 S6 kinase activity. Methods for evaluating mTOR activity, e.g., by inhibition of P70 S6 kinase, are discussed herein. The dose is insufficient to result in complete immune suppression but is sufficient to enhance the immune response. In an embodiment, the low, immune enhancing, dose of mTOR inhibitor results in a decrease in the number of PD-1 positive T cells and/or an increase in the number of PD-1 negative T cells, or an increase in the ratio of PD-1 negative T cells/PD-1 positive T cells. In an embodiment, the low, immune enhancing, dose of mTOR inhibitor results in an increase in the number of naive T cells. In an embodiment, the low, immune enhancing, dose of mTOR inhibitor results in one or more of the following:

[0287] an increase in the expression of one or more of the following markers: CD62L^{high}, CD127^{high}, CD27⁺, and BCL2, e.g., on memory T cells, e.g., memory T cell precursors;

[0288] a decrease in the expression of KLRG1, e.g., on memory T cells, e.g., memory T cell precursors; and

[0289] an increase in the number of memory T cell precursors, e.g., cells with any one or combination of the following characteristics: increased CD62^{high}, increased CD127^{high}, increased CD27⁺, decreased KLRG1, and increased BCL2;

[0290] wherein any of the changes described above occurs, e.g., at least transiently, e.g., as compared to a non-treated subject.

[0291] “Refractory” as used herein refers to a disease, e.g., cancer, that does not respond to a treatment. In embodiments, a refractory cancer can be resistant to a treatment before or at the beginning of the treatment. In other embodiments, the refractory cancer can become resistant during a treatment. A refractory cancer is also called a resistant cancer.

[0292] “Relapsed” as used herein refers to the return of a disease (e.g., cancer) or the signs and symptoms of a disease such as cancer after a period of improvement, e.g., after prior treatment of a therapy, e.g., cancer therapy

[0293] Ranges: throughout this disclosure, various aspects of the invention can be presented in a range format. It should be understood that the description in range format is merely for convenience and brevity and should not be construed as an inflexible limitation on the scope of the invention. Accordingly, the description of a range should be considered to have specifically disclosed all the possible subranges as well as individual numerical values within that range. For example, description of a range such as from 1 to 6 should be considered to have specifically disclosed subranges such as from 1 to 3, from 1 to 4, from 1 to 5, from 2 to 4, from 2 to 6, from 3 to 6 etc., as well as individual numbers within that range, for example, 1, 2, 2.7, 3, 4, 5, 5.3, and 6. As another example, a range such as 95-99% identity, includes something with 95%, 96%, 97%, 98% or 99% identity, and includes subranges such as 96-99%, 96-98%, 96-97%, 97-99%, 97-98% and 98-99% identity. This applies regardless of the breadth of the range.

### DESCRIPTION

[0294] Provided herein are compositions of matter and methods of use for the treatment of a disease associated with expression of a target CAR using immune effector cells (e.g., T cells, NK cells) engineered with anti-target CARs of the invention.

[0295] In one aspect, the invention provides a number of chimeric antigen receptors (CAR) comprising an antigen binding domain (e.g., antibody or antibody fragment, TCR or TCR fragment) engineered for specific binding to a tumor antigen, e.g., a tumor antigen described herein. In one aspect, the invention provides an immune effector cell (e.g., T cell, NK cell) engineered to express a CAR, wherein the engineered immune effector cell exhibits an anticancer property. In one aspect, a cell is transformed with the CAR and the CAR is expressed on the cell surface. In some embodiments, the cell (e.g., T cell, NK cell) is transduced with a viral vector encoding a CAR. In some embodiments, the viral vector is a retroviral vector. In some embodiments, the viral vector is a lentiviral vector. In some such embodiments, the cell may stably express the CAR. In another embodiment, the cell (e.g., T cell, NK cell) is transfected with a nucleic acid, e.g., mRNA, cDNA, DNA, encoding a CAR. In some such embodiments, the cell may transiently express the CAR.

[0296] In one aspect, the antigen binding domain of a CAR described herein is a scFv antibody fragment. In one aspect, such antibody fragments are functional in that they retain the equivalent binding affinity, e.g., they bind the same antigen with comparable affinity, as the IgG antibody from which it is derived. In other embodiments, the antibody fragment has a lower binding affinity, e.g., it binds the same antigen with a lower binding affinity than the antibody from which it is derived, but is functional in that it provides a biological response described herein. In one embodiment, the CAR molecule comprises an antibody fragment that has a binding affinity KD of 10⁻⁴ M to 10⁻⁸ M, e.g., 10⁻⁵ M to 10⁻⁷ M, e.g., 10⁻⁶ M or 10⁻⁷ M, for the target antigen. In one embodiment, the antibody fragment has a binding affinity that is at least five-fold, 10-fold, 20-fold, 30-fold, 50-fold, 100-fold or 1,000-fold less than a reference antibody, e.g., an antibody described herein.

[0297] In one aspect such antibody fragments are functional in that they provide a biological response that can include, but is not limited to, activation of an immune response, inhibition of signal-transduction origination from its target antigen, inhibition of kinase activity, and the like, as will be understood by a skilled artisan.

[0298] In one aspect, the antigen binding domain of the CAR is a scFv antibody fragment that is humanized compared to the murine sequence of the scFv from which it is derived.

[0299] In one aspect, the antigen binding domain of a CAR of the invention (e.g., a scFv) is encoded by a nucleic acid molecule whose sequence has been codon optimized for expression in a mammalian cell. In one aspect, entire CAR construct of the invention is encoded by a nucleic acid molecule whose entire sequence has been codon optimized for expression in a mammalian cell. Codon optimization refers to the discovery that the frequency of occurrence of synonymous codons (i.e., codons that code for the same amino acid) in coding DNA is biased in different species. Such codon degeneracy allows an identical polypeptide to be encoded by a variety of nucleotide sequences. A variety of codon optimization methods is known in the art, and include, e.g., methods disclosed in at least U.S. Pat. Nos. 5,786,464 and 6,114,148.

[0300] In one aspect, the CARs of the invention combine an antigen binding domain of a specific antibody with an intracellular signaling molecule. For example, in some aspects, the intracellular signaling molecule includes, but is not limited to, CD3-zeta chain, 4-1BB and CD28 signaling modules and combinations thereof. In one aspect, the antigen binding domain binds to a tumor antigen as described herein.

[0301] Furthermore, the present invention provides CARs and CAR-expressing cells and their use in medicaments or methods for treating, among other diseases, cancer or any malignancy or autoimmune diseases involving cells or tissues which express a tumor antigen as described herein.

[0302] In one aspect, the CAR of the invention can be used to eradicate a normal cell that express a tumor antigen as described herein, thereby applicable for use as a cellular conditioning therapy prior to cell transplantation. In one aspect, the normal cell that expresses a tumor antigen as described herein is a normal stem cell and the cell transplantation is a stem cell transplantation.

[0303] In one aspect, the invention provides an immune effector cell (e.g., T cell, NK cell) engineered to express a chimeric antigen receptor (CAR), wherein the engineered immune effector cell exhibits an antitumor property. A preferred antigen is a cancer associated antigen (i.e., tumor antigen) described herein. In one aspect, the antigen binding domain of the CAR comprises a partially humanized antibody fragment. In one aspect, the antigen binding domain of the CAR comprises a partially humanized scFv. Accordingly, the invention provides CARs that comprises a humanized antigen binding domain and is engineered into a cell, e.g., a T cell or a NK cell, and methods of their use for adoptive therapy.

[0304] In one aspect, the CARs of the invention comprise at least one intracellular domain selected from the group of a CD137 (4-1BB) signaling domain, a CD28 signaling domain, a CD27 signal domain, a CD3zeta signal domain, and any combination thereof. In one aspect, the CARs of the invention comprise at least one intracellular signaling domain is from one or more costimulatory molecule(s) other than a CD137 (4-1BB) or CD28.

[0305] Sequences of some examples of various components of CARs of the instant invention is listed in Table 1, where aa stands for amino acids, and na stands for nucleic acids that encode the corresponding peptide.

TABLE 1
Sequences of various components of CAR (aa - amino acids, na - nucleic acids
that encodes the corresponding protein)

| SEQ | | | Corresp. |
|---|---|---|---|
| ID | | | To |
| NO | description | Sequence | huCD19 |
| 400 | EF-1 | CGTGAGGCTCCGGTGCCCGTCAGTGGGCAGAGCGCAC | 100 |
| | promoter | ATCGCCCACAGTCCCCGAGAAGTTGGGGGGAGGGGTC | |
| | | GGCAATTGAACCGGTGCCTAGAGAAGGTGGCGCGGGG | |
| | | TAAACTGGGAAAGTGATGTCGTGTACTGGCTCCGCCTT | |
| | | TTTCCCGAGGGTGGGGGAGAACCGTATATAAGTGCAG | |
| | | TAGTCGCCGTGAACGTTCTTTTTCGCAACGGGTTTGCC | |
| | | GCCAGAACACAGGTAAGTGCCGTGTGTGGTTCCCGCG | |
| | | GGCCTGGCCTCTTTACGGGTTATGGCCCTTGCGTGCCT | |
| | | TGAATTACTTCCACCTGGCTGCAGTACGTGATTCTTGA | |
| | | TCCCGAGCTTCGGGTTGGAAGTGGGTGGGAGAGTTCG | |
| | | AGGCCTTGCGCTTAAGGAGCCCCTTCGCCTCGTGCTTG | |
| | | AGTTGAGGCCTGGCCTGGGCGCTGGGGCCGCCGCGTG | |
| | | CGAATCTGGTGGCACCTTCGCGCCTGTCTCGCTGCTTT | |
| | | CGATAAGTCTCTAGCCATTTAAAATTTTTGATGACCTG | |
| | | CTGCGACGCTTTTTTTCTGGCAAGATAGTCTTGTAAAT | |
| | | GCGGGCCAAGATCTGCACACTGGTATTTCGGTTTTTGG | |
| | | GGCCGCGGGCGGCGACGGGGCCCGTGCGTCCCAGCGC | |
| | | ACATGTTCGGCGAGGCGGGGCCTGCGAGCGCGGCCAC | |
| | | CGAGAATCGGACGGGGGTAGTCTCAAGCTGGCCGGCC | |
| | | TGCTCTGGTGCCTGGCCTCGCGCCGCCGTGTATCGCCC | |
| | | CGCCCTGGGCGGCAAGGCTGGCCCGGTCGGCACCAGT | |
| | | TGCGTGAGCGGAAAGATGGCCGCTTCCCGGCCCTGCTG | |
| | | CAGGGAGCTCAAAATGGAGGACGCGGCGCTCGGGAGA | |
| | | GCGGGCGGGTGAGTCACCCACACAAAGGAAAAGGGCC | |
| | | TTTCCGTCCTCAGCCGTCGCTTCATGTGACTCCACGGA | |
| | | GTACCGGGCGCCGTCCAGGCACCTCGATTAGTTCTCGA | |
| | | GCTTTTGGAGTACGTCGTCTTTAGGTTGGGGGGAGGGG | |
| | | TTTTATGCGATGGAGTTTCCCCACACTGAGTGGGTGGA | |
| | | GACTGAAGTTAGGCCAGCTTGGCACTTGATGTAATTCT | |
| | | CCTTGGAATTTGCCCTTTTTGAGTTTGGATCTTGGTTCA | |
| | | TTCTCAAGCCTCAGACAGTGGTTCAAAGTTTTTTTCTTC | |
| | | CATTTCAGGTGTCGTGA | |
| 401 | Leader (aa) | MALPVTALLLPLALLLHAARP | 13 |
| 402 | Leader (na) | ATGGCCCTGCCTGTGACAGCCCTGCTGCTGCCTCTGGC | 54 |
| | | TCTGCTGCTGCATGCCGCTAGACCC | |
| 403 | CD 8 hinge | TTTPAPRPPTPAPTIASQPLSLRPEACRPAAGGAVHTRGLD | 14 |
| | (aa) | FACD | |
| 404 | CD8 hinge | ACCACGACGCCAGCGCCGCGACCACCAACACCGGCGC | 55 |
| | (na) | CCACCATCGCGTCGCAGCCCCTGTCCCTGCGCCCAGAG | |
| | | GCGTGCCGGCCAGCGGCGGGGGGCGCAGTGCACACGA | |
| | | GGGGGCTGGACTTCGCCTGTGAT | |
| 405 | Ig4 hinge (aa) | ESKYGPPCPPCPAPEFLGGPSVFLFPPKPKDTLMISRTPEV | 102 |
| | | TCVVVDVSQEDPEVQFNWYVDGVEVHNAKTKPREEQFN | |
| | | STYRVVSVLTVLHQDWLNGKEYKCKVSNKGLPSSIEKTI | |
| | | SKAKGQPREPQVYTLPPSQEEMTKNQVSLTCLVKGFYPS | |
| | | DIAVEWESNGQPENNYKTTPPVLDSDGSFFLYSRLTVDKS | |
| | | RWQEGNVFSCSVMHEALHNHYTQKSLSLSLGKM | |
| 406 | Ig4 hinge | GAGAGCAAGTACGGCCCTCCCTGCCCCCCTTGCCCTGC | 103 |
| | (na) | CCCCGAGTTCCTGGGCGGACCCAGCGTGTTCCTGTTCC | |
| | | CCCCCAAGCCCAAGGACACCCTGATGATCAGCCGGAC | |
| | | CCCCGAGGTGACCTGTGTGGTGGTGGACGTGTCCCAGG | |
| | | AGGACCCCGAGGTCCAGTTCAACTGGTACGTGGACGG | |
| | | CGTGGAGGTGCACAACGCCAAGACCAAGCCCCGGGAG | |
| | | GAGCAGTTCAATAGCACCTACCGGGTGGTGTCCGTGCT | |
| | | GACCGTGCTGCACCAGGACTGGCTGAACGGCAAGGAA | |
| | | TACAAGTGTAAGGTGTCCAACAAGGGCCTGCCCAGCA | |
| | | GCATCGAGAAAACCATCAGCAAGGCCAAGGGCCAGCC | |
| | | TCGGGAGCCCCAGGTGTACACCCTGCCCCCTAGCCAAG | |
| | | AGGAGATGACCAAGAACCAGGTGTCCCTGACCTGCCT | |
| | | GGTGAAGGGCTTCTACCCCAGCGACATCGCCGTGGAG | |
| | | TGGGAGAGCAACGGCCAGCCCGAGAACAACTACAAGA | |
| | | CCACCCCCCCTGTGCTGGACAGCGACGGCAGCTTCTTC | |
| | | CTGTACAGCCGGCTGACCGTGGACAAGAGCCGGTGGC | |
| | | AGGAGGGCAACGTCTTTAGCTGCTCCGTGATGCACGA | |
| | | GGCCCTGCACAACCACTACACCCAGAAGAGCCTGAGC | |
| | | CTGTCCCTGGGCAAGATG | |
| 407 | IgD hinge | RWPESPKAQASSVPTAQPQAEGSLAKATTAPATTRNTGR | 47 |
| | (aa) | GGEEKKKEKEKEEQEERETKTPECPSHTQPLGVYLLTPA | |
| | | VQDLWLRDKATFTCFVVGSDLKDAHLTWEVAGKVPTG | |
| | | GVEEGLLERHSNGSQSQHSRLTLPRSLWNAGTSVTCTLN | |
| | | HPSLPPQRLMALREPAAQAPVKLSLNLLASSDPPEAASW | |
| | | LLCEVSGFSPPNILLMWLEDQREVNTSGFAPARPPPQPGS | |
| | | TTFWAWSVLRVPAPPSPQPATYTCVVSHEDSRTLLNASR | |
| | | SLEVSYVTDH | |
| 408 | IgD hinge | AGGTGGCCCGAAAGTCCCAAGGCCCAGGCATCTAGTG | 48 |
| | (na) | TTCCTACTGCACAGCCCCAGGCAGAAGGCAGCCTAGC | |
| | | CAAAGCTACTACTGCACCTGCCACTACGCGCAATACTG | |
| | | GCCGTGGCGGGGAGGAGAAGAAAAAGGAGAAAGAGA | |
| | | AAGAAGAACAGGAAGAGAGGGAGACCAAGACCCCTG | |
| | | AATGTCCATCCCATACCCAGCCGCTGGGCGTCTATCTC | |
| | | TTGACTCCCGCAGTACAGGACTTGTGGCTTAGAGATAA | |
| | | GGCCACCTTTACATGTTTCGTCGTGGGCTCTGACCTGA | |
| | | AGGATGCCCATTTGACTTGGGAGGTTGCCGGAAAGGT | |
| | | ACCCACAGGGGGGGTTGAGGAAGGGTTGCTGGAGCGC | |
| | | CATTCCAATGGCTCTCAGAGCCAGCACTCAAGACTCAC | |
| | | CCTTCCGAGATCCCTGTGGAACGCCGGGACCTCTGTCA | |
| | | CATGTACTCTAAATCATCCTAGCCTGCCCCCACAGCGT | |
| | | CTGATGGCCCTTAGAGAGCCAGCCGCCCAGGCACCAG | |
| | | TTAAGCTTAGCCTGAATCTGCTCGCCAGTAGTGATCCC | |
| | | CCAGAGGCCGCCAGCTGGCTCTTATGCGAAGTGTCCGG | |
| | | CTTTAGCCCGCCCAACATCTTGCTCATGTGGCTGGAGG | |
| | | ACCAGCGAGAAGTGAACACCAGCGGCTTCGCTCCAGC | |
| | | CCGGCCCCCACCCCAGCCGGGTTCTACCACATTCTGGG | |
| | | CCTGGAGTGTCTTAAGGGTCCCAGCACCACCTAGCCCC | |
| | | CAGCCAGCCACATACACCTGTGTTGTGTCCCATGAAGA | |
| | | TAGCAGGACCCTGCTAAATGCTTCTAGGAGTCTGGAGG | |
| | | TTTCCTACGTGACTGACCATT | |
| 10 | GS | GGGGSGGGGS | 49 |
| | hinge/linker | | |
| | (aa) | | |
| 11 | GS | GGTGGCGGAGGTTCTGGAGGTGGAGGTTCC | 50 |
| | hinge/linker | | |
| | (na) | | |
| 12 | CD8TM (aa) | IYIWAPLAGTCGVLLLSLVITLYC | 15 |
| 13 | CD8 TM (na) | ATCTACATCTGGGCGCCCTTGGCCGGGACTTGTGGGGT | 56 |
| | | CCTTCTCCTGTCACTGGTTATCACCCTTTACTGC | |
| 14 | 4-1BB | KRGRKKLLYIFKQPFMRPVQTTQEEDGCSCRFPEEEEGGC | 16 |
| | intracellular | EL | |
| | domain (aa) | | |
| 15 | 4-1BB | AAACGGGGCAGAAAGAAACTCCTGTATATATTCAAAC | 60 |
| | intracellular | AACCATTTATGAGACCAGTACAAACTACTCAAGAGGA | |
| | domain (na) | AGATGGCTGTAGCTGCCGATTTCCAGAAGAAGAAGAA | |
| | | GGAGGATGTGAACTG | |
| 16 | CD27 (aa) | QRRKYRSNKGESPVEPAEPCRYSCPREEEGSTIPIQEDYRK | 51 |
| | | PEPACSP | |
| 17 | CD27 (na) | AGGAGTAAGAGGAGCAGGCTCCTGCACAGTGACTACA | 52 |
| | | TGAACATGACTCCCCGCCGCCCCGGGCCCACCCGCAA | |
| | | GCATTACCAGCCCTATGCCCCACCACGCGACTTCGCAG | |
| | | CCTATCGCTCC | |
| 18 | CD3-zeta | RVKFSRSADAPAYKQGQNQLYNELNLGRREEYDVLDKR | 17 |
| | (aa) | RGRDPEMGGKPRRKNPQEGLYNELQKDKMAEAYSEIGM | |
| | | KGERRRGKGHDGLYQGLSTATKDTYDALHMQALPPR | |
| 19 | CD3-zeta | AGAGTGAAGTTCAGCAGGAGCGCAGACGCCCCCGCGT | 101 |
| | (na) | ACAAGCAGGGCCAGAACCAGCTCTATAACGAGCTCAA | |
| | | TCTAGGACGAAGAGAGGAGTACGATGTTTTGGACAAG | |
| | | AGACGTGGCCGGGACCCTGAGATGGGGGGAAAGCCGA | |
| | | GAAGGAAGAACCCTCAGGAAGGCCTGTACAATGAACT | |
| | | GCAGAAAGATAAGATGGCGGAGGCCTACAGTGAGATT | |
| | | GGGATGAAAGGCGAGCGCCGGAGGGGCAAGGGGCAC | |
| | | GATGGCCTTTACCAGGGTCTCAGTACAGCCACCAAGG | |
| | | ACACCTACGACGCCCTTCACATGCAGGCCCTGCCCCCT | |
| | | CGC | |
| 20 | CD3-zeta | RVKFSRSADAPAYQQGQNQLYNELNLGRREEYDVLDKR | 43 |
| | (aa) | RGRDPEMGGKPRRKNPQEGLYNELQKDKMAEAYSEIGM | |
| | | KGERRRGKGHDGLYQGLSTATKDTYDALHMQALPPR | |
| 21 | CD3-zeta | AGAGTGAAGTTCAGCAGGAGCGCAGACGCCCCCGCGT | 44 |
| | (na) | ACCAGCAGGGCCAG | |
| | | AACCAGCTCTATAACGAGCTCAATCTAGGACGAAGAG | |
| | | AGGAGTACGATGTTT | |
| | | TGGACAAGAGACGTGGCCGGGACCCTGAGATGGGGGG | |
| | | AAAGCCGAGAAGGA | |
| | | AGAACCCTCAGGAAGGCCTGTACAATGAACTGCAGAA | |
| | | AGATAAGATGGCGG | |
| | | AGGCCTACAGTGAGATTGGGATGAAAGGCGAGCGCCG | |
| | | GAGGGGCAAGGGGC | |
| | | ACGATGGCCTTTACCAGGGTCTCAGTACAGCCACCAAG | |
| | | GACACCTACGACGC | |
| | | CCTTCACATGCAGGCCCTGCCCCCTCGC | |
| 22 | linker | GGGGS | 18 |
| 23 | linker | GGTGGCGGAGGTTCTGGAGGTGGAGGTTCC | 50 |
| 24 | PD-1 | Pgwfldspdrpwnpptfspallvvtegdnatftcsfsntsesfvlnwyrmspsnqtdkl | |
| | extracellular | aafpedrsqpgqdcrfrvtqlpngrdfhmsvvrarrndsgtylcgaislapkaqikeslra | |
| | domain (aa) | elrvterraevptahpspsprpagqfqtlv | |
| 25 | PD-1 | Cccggatggtttctggactctccggatcgcccgtggaatcccccaaccttctcaccggcac | |
| | extracellular | tcttggttgtgactgagggcgataatgcgaccttcacgtgctcgttctccaacacctccgaat | |
| | domain (na) | cattcgtgctgaactggtaccgcatgagcccgtcaaaccagaccgacaagctcgccgcgt | |
| | | ttccggaagatcggtcgcaaccgggacaggattgtcggttccgcgtgactcaactgccga | |
| | | atggcagagacttccacatgagcgtggtccgcgctaggcgaaacgactccgggacctac | |
| | | ctgtgcggagccatctcgctggcgcctaaggcccaaatcaaagagagcttgagggccga | |
| | | actgagagtgaccgagcgcagagctgaggtgccaactgcacatccatccccatcgcctc | |
| | | ggcctgcggggcagtttcagaccctggtc | |
| 26 | PD-1 CAR | Malpvtalllplalllhaarppgwfldspdrpwnpptfspallvvtegdnatftcsfsntse | |
| | (aa) with | sfvlnwyrmspsnqtdklaafpedrsqpgqdcrfrvtqlpngrdfhmsvvrarrndsgt | |
| | signal | ylcgaislapkaqikeslraelrvterraevptahpspsprpagqfqtlvtttpaprpptpap | |
| | | tiasqplslrpeacrpaaggavhtrgldfacdiyiwaplagtcgvlllslvitlyckrgrkkll | |
| | | yifkqpfmrpvqttqeedgcscrfpeeeeggceltvkfsrsadapaykqgqnqlyneln | |
| | | lgrreeydvldkttgrdpemggkprrknpqeglynelqkdkmaeayseigmkgerrr | |
| | | gkghdglyqglstatkdtydalhmqalppr | |
| 27 | PD-1 CAR | Atggccctccctgtcactgccctgcttctccccctcgcactcctgctccacgccgctagac | |
| | (na) | cacccggatggtttctggactctccggatcgcccgtggaatcccccaaccttctcaccggc | |
| | | actcttggttgtgactgagggcgataatgcgaccttcacgtgctcgttctccaacacctccga | |
| | | atcattcgtgctgaactggtaccgcatgagcccgtcaaaccagaccgacaagctcgccgc | |
| | | gtttccggaagatcggtcgcaaccgggacaggattgtcggttccgcgtgactcaactgcc | |
| | | gaatggcagagacttccacatgagcgtggtccgcgctaggcgaaacgactccgggacct | |
| | | acctgtgcggagccatctcgctggcgcctaaggcccaaatcaaagagagcttgagggcc | |
| | | gaactgagagtgaccgagcgcagagctgaggtgccaactgcacatccatccccatcgcc | |
| | | tcggcctgcggggcagtttcagaccctggtcacgaccactccggcgccgcgcccaccga | |
| | | ctccggccccaactatcgcgagccagcccctgtcgctgaggccggaagcatgccgccct | |
| | | gccgccggaggtgctgtgcatacccggggattggacttcgcatgcgacatctacatttggg | |
| | | ctcctctcgccggaacttgtggcgtgctccttctgtccctggtcatcaccctgtactgcaagc | |
| | | ggggtcggaaaaagcttctgtacattttcaagcagcccttcatgaggcccgtgcaaaccac | |
| | | ccaggaggaggacggttgctcctgccggttccccgaagaggaagaaggaggttgcgag | |
| | | ctgcgcgtgaagttctcccggagcgccgacgcccccgcctataagcagggccagaacca | |
| | | gctgtacaacgaactgaacctgggacggcgggaagagtacgatgtgctggacaagcgg | |
| | | cgcggccgggaccccgaaatgggcgggaagcctagaagaaagaaccctcaggaaggc | |
| | | ctgtataacgagctgcagaaggacaagatggccgaggcctactccgaaattgggatgaa | |
| | | gggagagcggcggaggggaaaggggcacgacggcctgtaccaaggactgtccaccg | |
| | | ccaccaaggacacatacgatgccctgcacatgcaggcccttccccctcgc | |
| 28 | linker | (Gly-Gly-Gly-Ser)ₙ, where ₙ = 1-10 | 105 |
| 29 | linker | (Gly4 Ser)4 | 106 |
| 30 | linker | (Gly4 Ser)3 | 107 |
| 31 | linker | (Gly3Ser) | 108 |
| 32 | polyA | (aaaaaaaaaa)ₙ, where ₙ = 200 | 118 |
| 33 | polyA | (aaaaaaaaaa)ₙ, where ₙ = 15 | 104 |
| 34 | polyA | (aaaaaaaaaa)ₙ, where ₙ = 500 | 109 |
| 35 | polyA | (tttttttttt)ₙ, where ₙ = 10 | 110 |
| 36 | polyA | (tttttttttt)ₙ, where ₙ = 500 | 111 |
| 37 | polyA | (aaaaaaaaaa)ₙ, where ₙ = 500 | 112 |
| 38 | polyA | (aaaaaaaaaa)ₙ, where ₙ = 40 | 113 |
| 39 | PD1 CAR | Pgwfldspdrpwnpptfspallvvtegdnatftcsfsntsesfvlnwyrmspsnqtdkl | |
| | (aa) | aafpedrsqpgqdcrfrvtqlpngrdfhmsvvrarrndsgtylcgaislapkaqikeslra | |
| | | elrvterraevptahpspsprpagqfqtlvtttpaprpptpaptiasqplslrpeacrpaag | |
| | | gavhtrgldfacdiyiwaplagtcgvlllslvitlyckrgrkkllyitkqpfmrpvqttqee | |
| | | dgcscrfpeeeeggcelrvkfsrsadapaykqgqnqlynelnlgrreeydvldkrrgrd | |
| | | pemggkprrknpqeglynelqkdkmaeayseigmkgerrrgkghdglyqglstatk | |
| | | dtydalhmqalppr | |

### Cancer Associated Antigens

[0306] In certain aspects, the present invention provides immune effector cells (e.g., T cells, NK cells) that are engineered to contain one or more CARs that direct the immune effector cells to cancer. This is achieved through an antigen binding domain on the CAR that is specific for a cancer associated antigen. There are two classes of cancer associated antigens (tumor antigens) that can be targeted by the CARs of the instant invention: (1) cancer associated antigens that are expressed on the surface of cancer cells; and (2) cancer associated antigens that itself is intracellar, however, a fragment of such antigen (peptide) is presented on the surface of the cancer cells by MHC (major histocompatibility complex).

[0307] Accordingly, the present invention provides CARs that target the following cancer associated antigens (tumor antigens): CD19, CD123, CD22, CD30, CD171, CS-1, CLL-1 (CLECL1), CD33, EGFRvIII, GD2, GD3, BCMA, Tn Ag, PSMA, ROR1, FLT3, FAP, TAG72, CD38, CD44v6, CEA, EPCAM, B7H3, KIT, IL-13Ra2, Mesothelin, IL-11Ra, PSCA, VEGFR2, LewisY, CD24, PDGFR-beta, PRSS21, SSEA-4, CD20, Folate receptor alpha, ERBB2 (Her2/neu), MUC1, EGFR, NCAM, Prostase, PAP, ELF2M, Ephrin B2, IGF-I receptor, CAIX, LMP2, gp100, bcr-abl, tyrosinase, EphA2, Fucosyl GM1, sLe, GM3, TGS5, HMWMAA, o-acetyl-GD2, Folate receptor beta, TEM1/CD248, TEM7R, CLDN6, TSHR, GPRC5D, CXORF61, CD97, CD179a, ALK, Polysialic acid, PLAC1, GloboH, NY-BR-1, UPK2, HAVCR1, ADRB3, PANX3, GPR20, LY6K, OR51E2, TARP, WT1, NY-ESO-1, LAGE-1a, legumain, HPV E6,E7, MAGE-A1, MAGE A1, ETV6-AML, sperm protein 17, XAGE1, Tie 2, MAD-CT-1, MAD-CT-2, Fos-related antigen 1, p53, p53 mutant, prostein, survivin and telomerase, PCTA-1/Galectin 8, MelanA/MART1, Ras mutant, hTERT, sarcoma translocation breakpoints, ML-IAP, ERG (TMPRSS2 ETS fusion gene), NA17, PAX3, Androgen receptor, Cyclin B1, MYCN, RhoC, TRP-2, CYP1B1, BORIS, SART3, PAX5, OY-TES1, LCK, AKAP-4, SSX2, RAGE-1, human telomerase reverse transcriptase, RU1, RU2, intestinal carboxyl esterase, mut hsp70-2, CD79a, CD79b, CD72, LAIR1, FCAR, LILRA2, CD300LF, CLEC12A, BST2, EMR2, LY75, GPC3, FCRL5, and IGLL1.

### Anti-Target Chimeric Antigen Receptor (CAR)

[0308] The present invention encompasses a recombinant DNA construct comprising sequences encoding an anti-target CAR, wherein the anti-target CAR comprises a ligand that binds to a target CAR, e.g., a target CAR described herein. In an embodiment, the ligand comprises a cognate antigen molecule or an antibody molecule that binds the target CAR. In an embodiment, the antibody molecule that binds the target CAR comprises an antibody molecule that binds an extracellular domain of the target CAR, e.g., an antigen binding domain or a hinge domain of the target CAR. In an embodiment, the antibody molecule that binds the target CAR comprises an anti-idiotypic antibody molecule, e.g., an anti-idiotypic antibody molecule that binds the target CAR, e.g., binds an extracellular domain of the target CAR (e.g., an antigen binding domain or a hinge domain of the target CAR). In an embodiment, the antigen binding domain comprises a variable light (VL) domain and a variable heavy (VH) domain, optionally connected with a linker, e.g., as described herein. In an embodiment, the order of the variable domain, e.g., in which the VL and VH domains appear in the antigen binding domain, e.g., scFv, can be varied (i.e., VL-VH, or VH-VL orientation). In an embodiment, the antigen binding domain comprises a VL domain followed by a VH domain (i.e., VL-VH). In an embodiment, the antigen binding domain comprises a VH domain followed by a VL domain (i.e., VL-VH).

[0309] In an embodiment, the sequence of the ligand is contiguous with and in the same reading frame as a nucleic acid sequence encoding an intracellular signaling domain. The intracellular signaling domain can comprise a costimulatory signaling domain and/or a primary signaling domain, e.g., a zeta chain. The costimulatory signaling domain can be a portion of the anti-target CAR comprising at least a portion of the intracellular domain of a costimulatory molecule.

[0310] In specific aspects, an anti-target CAR construct of the invention comprises a scFv domain, wherein the scFv may be preceded by an optional leader sequence such as provided in SEQ ID NO: 401, and followed by an optional hinge sequence such as provided in SEQ ID NO:403 or SEQ ID NO:405 or SEQ ID NO:407 or SEQ ID NO:10, a transmembrane region such as provided in SEQ ID NO:12, an intracellular signalling domain that includes SEQ ID NO:14, and a CD3 zeta sequence that includes SEQ ID NO:18 or SEQ ID NO:20, e.g., wherein the domains are contiguous with and in the same reading frame to form a single fusion protein.

[0311] In one aspect, an exemplary anti-target CAR construct comprises an optional leader sequence (e.g., a leader sequence described herein), a ligand (e.g., a cognate antigen molecule or an antibody molecule that binds a target CAR), a hinge (e.g., a hinge region described herein), a transmembrane domain (e.g., a transmembrane domain described herein), and an intracellular stimulatory domain (e.g., an intracellular stimulatory domain described herein). In one aspect, an exemplary anti-target CAR construct comprises an optional leader sequence (e.g., a leader sequence described herein), a ligand (e.g., a cognate antigen molecule or an antibody molecule that binds a target CAR), a hinge (e.g., a hinge region described herein), a transmembrane domain (e.g., a transmembrane domain described herein), an intracellular costimulatory signaling domain (e.g., a costimulatory signaling domain described herein) and/or an intracellular primary signaling domain (e.g., a primary signaling domain described herein).

[0312] An exemplary leader sequence is provided as SEQ ID NO: 401. An exemplary hinge/spacer sequence is provided as SEQ ID NO: 403 or SEQ ID NO:405 or SEQ ID NO:407 or SEQ ID NO:10. An exemplary transmembrane domain sequence is provided as SEQ ID NO:12. An exemplary sequence of the intracellular signaling domain of 4-1BB is provided as SEQ ID NO: 14. An exemplary CD3zeta domain sequence is provided as SEQ ID NO: 18 or SEQ ID NO:20.

[0313] In one aspect, the present invention encompasses a recombinant nucleic acid construct comprising a nucleic acid molecule encoding an anti-target CAR, wherein the nucleic acid molecule comprises the nucleic acid sequence encoding a ligand, e.g., as described herein, that is contiguous with and in the same reading frame as a nucleic acid sequence encoding an intracellular signaling domain.

[0314] In one aspect, the present invention encompasses a recombinant nucleic acid construct comprising a nucleic acid molecule encoding an anti-target CAR, wherein the nucleic acid molecule comprises a nucleic acid sequence encoding a ligand, wherein the sequence is contiguous with and in the same reading frame as the nucleic acid sequence encoding an intracellular signaling domain. An exemplary intracellular signaling domain that can be used in the anti-target CAR includes, but is not limited to, one or more intracellular signaling domains of, e.g., CD3-zeta, CD28, CD27, 4-1BB, and the like. In some instances, the anti-target CAR can comprise any combination of CD3-zeta, CD28, 4-1BB, and the like.

[0315] The nucleic acid sequences coding for the desired molecules can be obtained using recombinant methods known in the art, such as, for example by screening libraries from cells expressing the nucleic acid molecule, by deriving the nucleic acid molecule from a vector known to include the same, or by isolating directly from cells and tissues containing the same, using standard techniques. Alternatively, the nucleic acid of interest can be produced synthetically, rather than cloned.

[0316] The present invention includes retroviral and lentiviral vector constructs expressing an anti-target CAR that can be directly transduced into a cell.

[0317] The present invention also includes an RNA construct that can be directly transfected into a cell. A method for generating mRNA for use in transfection involves in vitro transcription (IVT) of a template with specially designed primers, followed by polyA addition, to produce a construct containing 3′ and 5′ untranslated sequence (“UTR”) (e.g., a 3′ and/or 5′ UTR described herein), a 5′ cap (e.g., a 5′ cap described herein) and/or Internal Ribosome Entry Site (IRES) (e.g., an IRES described herein), the nucleic acid to be expressed, and a polyA tail, typically 50-2000 bases in length (SEQ ID NO:32). RNA so produced can efficiently transfect different kinds of cells. In one embodiment, the template includes sequences for the CAR. In an embodiment, an RNA CAR vector is transduced into a cell, e.g., a T cell or a NK cell, by electroporation.

### Anti-Target CAR Ligand

[0318] In an embodiment, the anti-target CAR comprises a ligand that binds to a target CAR, e.g., a target CAR described herein. In an embodiment, the ligand comprises a cognate antigen molecule or an antibody molecule that binds the target CAR. In an embodiment, the antibody molecule that binds the target CAR comprises an antibody molecule that binds an extracellular domain of the target CAR, e.g., an antigen binding domain or a hinge domain of the target CAR. In an embodiment, the antibody molecule that binds the target CAR comprises an anti-idiotypic antibody molecule, e.g., an anti-idiotypic antibody molecule that binds the target CAR, e.g., binds an extracellular domain of the target CAR (e.g., an antigen binding domain or a hinge domain of the target CAR).

[0319] In an embodiment, the target CAR is chosen from: an CD19CAR, CD20CAR, CD22CAR, mesothelinCAR, CLL-1CAR, EGFRvIIICAR, or a CAR targeting any tumor antigen described herein. In an embodiment, the target CAR is a CD19 CAR.

[0320] In an embodiment, the target CAR is a target CAR described herein, and the anti-target CAR comprises a ligand that binds to the target CAR, e.g., binds an extracellular domain of the target CAR (e.g., an antigen binding domain or a hinge domain of the target CAR). In an embodiment, the ligand of the anti-target CAR binds to the target CAR antigen binding domain. In an embodiment, the ligand of the anti-target CAR binds to the hinge domain of the target CAR.

[0321] In an embodiment, the anti-target CAR ligand comprises an antibody molecule, e.g., an anti-idiotypic antibody molecule, e.g., an antibody molecule that binds to the antigen binding domain on the surface of the target CAR.

[0322] In an embodiment, the anti-target CAR ligand comprises a cognate antigen, e.g., a target antigen, which binds to, e.g., the target antigen binding domain on the surface of the target CAR. In some embodiments, the ligand that comprises the cognate antigen comprises the full length protein that comprises the cognate antigen. In other embodiments, the ligand that comprises the cognate antigen comprises an fragment or mutant of the protein that comprises the cognate antigen, wherein the fragment or mutant binds a target CAR.

[0323] In an embodiment, the anti-target CAR ligand comprises an antibody molecule that binds to the target antigen binding domain and/or the hinge region of the target-CAR.

### Anti-CD19 CAR

[0324] In an embodiment, the target CAR is a CD19CAR and the anti-target CAR comprises a ligand that binds to a CD19CAR, e.g., binds an extracellular domain of the CD19CAR (e.g., an antigen binding domain (e.g., a CD19 antigen binding domain) or a hinge domain of the CD19CAR). In an embodiment, the ligand of the anti-target CAR binds to the CD19 antigen binding domain of the CD19CAR. In an embodiment, the ligand of the anti-target CAR binds to the hinge domain of the CD19CAR.

[0325] In an embodiment, the anti-target CAR ligand comprises a cognate antigen, e.g., a CD19 antigen, which binds to, e.g., the CD19 antigen binding domain on the surface of the CD19CAR.

[0326] In an embodiment, the anti-target CAR ligand comprises an antibody molecule that binds to the CD19 antigen binding domain and/or the hinge region of the CD19CAR.

[0327] In an embodiment, the anti-target CAR ligand comprises an antibody molecule, e.g., an anti-idiotypic antibody molecule, e.g., an antibody molecule that binds to the CD19 antigen binding domain on the surface of the CD19CAR. In an embodiment, the anti-idiotypic antibody molecule comprises the anti-idiotypic antibody that binds anti-CD19 of clone no. 136.20.1, as disclosed in International Application WO 2014/190273, filed on May 23, 2014, the entire contents of which are hereby incorporated by reference.

[0328] Exemplary anti-CAR antibodies that can be used in the methods disclosed herein are described, e.g., in WO 2014/190273 and by Jena et al., “Chimeric Antigen Receptor (CAR)-Specific Monoclonal Antibody to Detect CD19-Specific T cells in Clinical Trials”, PLOS March 2013 8:3 e57838, the contents of which are incorporated by reference.

[0329] In one embodiment, the anti-idiotypic antibody molecule recognizes an anti-CD19 antibody molecule, e.g., an anti-CD19 scFv. For instance, the anti-idiotypic antibody molecule can compete for binding with the CD19-specific CAR mAb clone no. 136.20.1 described in Jena et al., PLOS March 2013 8:3 e57838; may have the same CDRs (e.g., one or more of, e.g., all of, VH CDR1, VH CDR2, CH CDR3, VL CDR1, VL CDR2, and VL CDR3, using the Kabat definition, the Chothia definition, or a combination of the Kabat and Chothia definitions) as the CD19-specific CAR mAb clone no. 136.20.1; may have one or more (e.g., 2) variable regions as the CD19-specific CAR mAb clone no. 136.20.1, or may comprise the CD19-specific CAR mAb clone no. 136.20.1. In some embodiments, the anti-idiotypic antibody was made according to a method described in Jena et al. In another embodiment, the anti-idiotypic antibody molecule is an anti-idiotypic antibody molecule described in WO 2014/190273. In some embodiments, the anti-idiotypic antibody molecule has the same CDRs (e.g., one or more of, e.g., all of, VH CDR1, VH CDR2, CH CDR3, VL CDR1, VL CDR2, and VL CDR3) as an antibody molecule of WO 2014/190273 such as 136.20.1; may have one or more (e.g., 2) variable regions of an antibody molecule of WO 2014/190273, or may comprise an antibody molecule of WO 2014/190273 such as 136.20.1. In other embodiments, the anti-target CAR antibody binds to a constant region of the extracellular binding domain of the target CAR molecule, e.g., as described in WO 2014/190273. In some embodiments, the anti-target CAR antibody binds to a constant region of the extracellular binding domain of the target CAR molecule, e.g., a heavy chain constant region (e.g., a CH2-CH3 hinge region) or light chain constant region. For instance, in some embodiments the anti-target CAR antibody competes for binding with the 2D3 monoclonal antibody described in WO 2014/190273, has the same CDRs (e.g., one or more of, e.g., all of, VH CDR1, VH CDR2, CH CDR3, VL CDR1, VL CDR2, and VL CDR3) as 2D3, or has one or more (e.g., 2) variable regions of 2D3, or comprises 2D3 as described in WO 2014/190273.

Clone 136.20.1, as disclosed in WO 2014/190273:

HCDR1:
(SEQ ID NO: 2005)
GFDFSRYW
HCDR2:
(SEQ ID NO: 2006)
INLDSSTI
HCDR3:
(SEQ ID NO: 2007)
ARRYDAMDY
LCDR1:
((SEQ ID NO: 2008)
ESVDDYGISF
LCDR2:
(SEQ ID NO: 2009)
AAP
LCDR3:
(SEQ ID NO: 2010)
QQSKD
VH:
(SEQ ID NO: 2011)
LKPREVKLVESGGGLVQPGGSLKLSCAASGFDFSRYWMSWVRQAPGKGLE
WIGEINLDSSTINYTPSLKDKFIISRDNAKNTLYLQMSKVRSEDTALYYC
ARRYDAMDYWGQGTSVTVSSAKTTAPSVYPLAPVCGDTTGSSVTLGCLVK
ASQ
VL:
(SEQ ID NO: 2012)
ASDIVLTQSPASLAVSLGQRATISCRASESVDDYGISFMNWFQQKPGQPP
KLLIYAAPNQGSGVPARFSGSGSGTDFSLNIHPMEEDDTAMYFCQQSKDV
RWRHQAGDQTG

### Other Anti-Target CARs

[0330] In an embodiment, the target CAR is a CD33CAR and the anti-target CAR comprises a ligand that binds to a CD33CAR, e.g., binds an extracellular domain of the CD33CAR (e.g., an antigen binding domain (e.g., a CD33 antigen binding domain) or a hinge domain of the CD33CAR). In an embodiment, the ligand of the anti-target CAR binds to the CD33 antigen binding domain of the CD33CAR. In an embodiment, the ligand of the anti-target CAR binds to the hinge domain of the CD33CAR. In an embodiment, the anti-target CAR ligand comprises a cognate antigen, e.g., a CD33 antigen, which binds to, e.g., the CD33 antigen binding domain on the surface of the CD33CAR. In an embodiment, the anti-target CAR ligand comprises an antibody molecule that binds to the CD33 antigen binding domain and/or the hinge region of the CD33CAR. In an embodiment, the anti-target CAR ligand comprises an antibody molecule, e.g., an anti-idiotypic antibody molecule, e.g., an antibody molecule that binds to the CD33 antigen binding domain on the surface of the CD33CAR.

[0331] In an embodiment, the target CAR is a EGFRvIIICAR and the anti-target CAR comprises a ligand that binds to a EGFRvIIICAR, e.g., binds an extracellular domain of the EGFRvIIICAR “(e.g., an antigen binding domain (e.g., a EGFRvIII antigen binding domain)” or a hinge domain of the EGFRvIIICAR). In an embodiment, the ligand of the anti-target CAR binds to the EGFRvIII antigen binding domain of the EGFRvIIICAR. In an embodiment, the ligand of the anti-target CAR binds to the hinge domain of the EGFRvIII CAR. In an embodiment, the anti-target CAR ligand comprises a cognate antigen, e.g., a EGFRvIII antigen, which binds to, e.g., the EGFRvIII antigen binding domain on the surface of the EGFRvIIICAR. In an embodiment, the anti-target CAR ligand comprises an antibody molecule that binds to the EGFRvIII antigen binding domain and/or the hinge region of the EGFRvIIICAR. In an embodiment, the anti-target CAR ligand comprises an antibody molecule, e.g., an anti-idiotypic antibody molecule, e.g., an antibody molecule that binds to the EGFRvIII antigen binding domain on the surface of the EGFRvIIICAR.

[0332] In an embodiment, the target CAR is a mesothelinCAR and the anti-target CAR comprises a ligand that binds to a mesothelinCAR, e.g., binds an extracellular domain of the mesothelinCAR (e.g., an antigen binding domain (e.g., a mesothelin antigen binding domain) or a hinge domain of the mesothelinCAR). In an embodiment, the ligand of the anti-target CAR binds to the mesothelin antigen binding domain of the mesothelinCAR. In an embodiment, the ligand of the anti-target CAR binds to the hinge domain of the mesothelinCAR. In an embodiment, the anti-target CAR ligand comprises a cognate antigen, e.g., a mesothelin antigen, which binds to, e.g., the mesothelin antigen binding domain on the surface of the mesothelinCAR. In an embodiment, the anti-target CAR ligand comprises an antibody molecule that binds to the mesothelin antigen binding domain and/or the hinge region of the mesothelinCAR. In an embodiment, the anti-target CAR ligand comprises an antibody molecule, e.g., an anti-idiotypic antibody molecule, e.g., an antibody molecule that binds to the mesothelin antigen binding domain on the surface of the mesothelinCAR.

[0333] In an embodiment, the target CAR is a BCMACAR and the anti-target CAR comprises a ligand that binds to a BCMACAR, e.g., binds an extracellular domain of the BCMACAR (e.g., an antigen binding domain (e.g., a BCMA antigen binding domain) or a hinge domain of the BCMACAR). In an embodiment, the ligand of the anti-target CAR binds to the BCMA antigen binding domain of the BCMACAR. In an embodiment, the ligand of the anti-target CAR binds to the hinge domain of the BCMACAR. In an embodiment, the anti-target CAR ligand comprises a cognate antigen, e.g., a BCMA antigen, which binds to, e.g., the BCMA antigen binding domain on the surface of the BCMACAR. In an embodiment, the anti-target CAR ligand comprises an antibody molecule that binds to the BCMA antigen binding domain and/or the hinge region of the BCMACAR. In an embodiment, the anti-target CAR ligand comprises an antibody molecule, e.g., an anti-idiotypic antibody molecule, e.g., an antibody molecule that binds to the BCMA antigen binding domain on the surface of the BCMACAR.

[0334] In an embodiment, the target CAR is a CD20CAR and the anti-target CAR comprises a ligand that binds to a CD20CAR, e.g., binds an extracellular domain of the CD20CAR (e.g., an antigen binding domain (e.g., a CD20 antigen binding domain) or a hinge domain of the CD20 CAR). In an embodiment, the ligand of the anti-target CAR binds to the CD20 antigen binding domain of the CD20CAR. In an embodiment, the ligand of the anti-target CAR binds to the hinge domain of the CD20CAR. In an embodiment, the anti-target CAR ligand comprises a cognate antigen, e.g., a CD20 antigen, which binds to, e.g., the CD20 antigen binding domain on the surface of the CD20CAR. In an embodiment, the anti-target CAR ligand comprises an antibody molecule that binds to the CD20 antigen binding domain and/or the hinge region of the CD20CAR. In an embodiment, the anti-target CAR ligand comprises an antibody molecule, e.g., an anti-idiotypic antibody molecule, e.g., an antibody molecule that binds to the CD20 antigen binding domain on the surface of the CD20CAR.

[0335] In an embodiment, the target CAR is a CD22CAR and the anti-target CAR comprises a ligand that binds to a CD22CAR, e.g., binds an extracellular domain of the CD22CAR (e.g., an antigen binding domain (e.g., a CD22 antigen binding domain) or a hinge domain of the CD22CAR). In an embodiment, the ligand of the anti-target CAR binds to the CD22 antigen binding domain of the CD22CAR. In an embodiment, the ligand of the anti-target CAR binds to the hinge domain of the CD22CAR. In an embodiment, the anti-target CAR ligand comprises a cognate antigen, e.g., a CD22 antigen, which binds to, e.g., the CD22 antigen binding domain on the surface of the CD22CAR. In an embodiment, the anti-target CAR ligand comprises an antibody molecule that binds to the CD22 antigen binding domain and/or the hinge region of the CD22CAR. In an embodiment, the anti-target CAR ligand comprises an antibody molecule, e.g., an anti-idiotypic antibody molecule, e.g., an antibody molecule that binds to the CD22 antigen binding domain on the surface of the CD22CAR.

[0336] In an embodiment, the target CAR is a CD123CAR and the anti-target CAR comprises a ligand that binds to a CD123CAR, e.g., binds an extracellular domain of the CD123CAR (e.g., an antigen binding domain (e.g., a CD22 antigen binding domain) or a hinge domain of the CD123CAR). In an embodiment, the ligand of the anti-target CAR binds to the CD123 antigen binding domain of the CD123CAR. In an embodiment, the ligand of the anti-target CAR binds to the hinge domain of the CD123CAR. In an embodiment, the anti-target CAR ligand comprises a cognate antigen, e.g., a CD123 antigen, which binds to, e.g., the CD123 antigen binding domain on the surface of the CD123CAR. In an embodiment, the anti-target CAR ligand comprises an antibody molecule that binds to the CD123 antigen binding domain and/or the hinge region of the CD123CAR. In an embodiment, the anti-target CAR ligand comprises an antibody molecule, e.g., an anti-idiotypic antibody molecule, e.g., an antibody molecule that binds to the CD123 antigen binding domain on the surface of the CD123CAR.

### Transmembrane Domain

[0337] With respect to the transmembrane domain, in various embodiments, an anti-target CAR can be designed to comprise a transmembrane domain that is attached to the extracellular domain, e.g., ligand, of the anti-target CAR. A transmembrane domain can include one or more additional amino acids adjacent to the transmembrane region, e.g., one or more amino acid associated with the extracellular region of the protein from which the transmembrane was derived (e.g., 1, 2, 3, 4, 5, 6, 7, 8, 9, 10 up to 15 amino acids of the extracellular region) and/or one or more additional amino acids associated with the intracellular region of the protein from which the transmembrane protein is derived (e.g., 1, 2, 3, 4, 5, 6, 7, 8, 9, 10 up to 15 amino acids of the intracellular region). In one aspect, the transmembrane domain is one that is associated with one of the other domains of the anti-target CAR, e.g., in one embodiment, the transmembrane domain may be from the same protein that the signaling domain, costimulatory domain or the hinge domain is derived from. In another aspect, the transmembrane domain is not derived from the same protein that any other domain of the anti-target CAR is derived from. In some instances, the transmembrane domain can be selected or modified by amino acid substitution to avoid binding of such domains to the transmembrane domains of the same or different surface membrane proteins, e.g., to minimize interactions with other members of the receptor complex.

[0338] The transmembrane domain may be derived either from a natural or from a recombinant source. Where the source is natural, the domain may be derived from any membrane-bound or transmembrane protein. In one aspect the transmembrane domain is capable of signaling to the intracellular domain(s) whenever the anti-target CAR has bound to a target. A transmembrane domain of particular use in this invention may include at least the transmembrane region(s) of e.g., the alpha, beta or zeta chain of the T-cell receptor, CD28, CD27, CD3 epsilon, CD45, CD4, CD5, CD8, CD9, CD16, CD22, CD33, CD37, CD64, CD80, CD86, CD134, CD137, CD154. In some embodiments, a transmembrane domain may include at least the transmembrane region(s) of, e.g., KIRDS2, OX40, CD2, CD27, LFA-1 (CD11a, CD18), ICOS (CD278), 4-1BB (CD137), GITR, CD40, BAFFR, HVEM (LIGHTR), SLAMF7, NKp80 (KLRF1), NKp44, NKp30, NKp46, CD160, CD19, IL2R beta, IL2R gamma, IL7R α, ITGA1, VLA1, CD49a, ITGA4, IA4, CD49D, ITGA6, VLA-6, CD49f, ITGAD, CD11d, ITGAE, CD103, ITGAL, CD11a, LFA-1, ITGAM, CD11b, ITGAX, CD11c, ITGB1, CD29, ITGB2, CD18, LFA-1, ITGB7, TNFR2, DNAM1 (CD226), SLAMF4 (CD244, 2B4), CD84, CD96 (Tactile), CEACAM1, CRTAM, Ly9 (CD229), CD160 (BY55), PSGL1, CD100 (SEMA4D), SLAMF6 (NTB-A, Ly108), SLAM (SLAMF1, CD150, IPO-3), BLAME (SLAMF8), SELPLG (CD162), LTBR, PAG/Cbp, NKG2D, NKG2C.

[0339] In some instances, the transmembrane domain can be attached to the extracellular region of the anti-target CAR, e.g., the ligand of the anti-target CAR, via a hinge, e.g., a hinge from a human protein. For example, in one embodiment, the hinge can be a human Ig (immunoglobulin) hinge (e.g., an IgG4 hinge, an IgD hinge), a GS linker (e.g., a GS linker described herein), a KIR2DS2 hinge or a CD8a hinge. In one embodiment, the hinge or spacer comprises (e.g., consists of) the amino acid sequence of SEQ ID NO:403. In one aspect, the transmembrane domain comprises (e.g., consists of) a transmembrane domain of SEQ ID NO: 12.

[0340] In one aspect, the hinge or spacer comprises an IgG4 hinge. For example, in one embodiment, the hinge or spacer comprises a hinge of the amino acid sequence ESKYGPPCPPCPAPEFLGGPSVFLFPPKPKDTLMISRTPEVTCVVVDVSQEDPEVQFN WYVDGVEVHNAKTKPREEQFNSTYRVVSVLTVLHQDWLNGKEYKCKVSNKGLPS SIEKTISKAKGQPREPQVYTLPPSQEEMTKNQVSLTCLVKGFYPSDIAVEWESNGQP ENNYKTTPPVLDSDGSFFLYSRLTVDKSRWQEGNVFSCSVMHEALHNHYTQKSLS LSLGKM (SEQ ID NO:405). In some embodiments, the hinge or spacer comprises a hinge encoded by a nucleotide sequence of

(SEQ ID NO: 406)
GAGAGCAAGTACGGCCCTCCCTGCCCCCCTTGCCCTGCCCCCGAGTTCCT
GGGCGGACCCAGCGTGTTCCTGTTCCCCCCCAAGCCCAAGGACACCCTGA
TGATCAGCCGGACCCCCGAGGTGACCTGTGTGGTGGTGGACGTGTCCCAG
GAGGACCCCGAGGTCCAGTTCAACTGGTACGTGGACGGCGTGGAGGTGCA
CAACGCCAAGACCAAGCCCCGGGAGGAGCAGTTCAATAGCACCTACCGGG
TGGTGTCCGTGCTGACCGTGCTGCACCAGGACTGGCTGAACGGCAAGGAA
TACAAGTGTAAGGTGTCCAACAAGGGCCTGCCCAGCAGCATCGAGAAAAC
CATCAGCAAGGCCAAGGGCCAGCCTCGGGAGCCCCAGGTGTACACCCTGC
CCCCTAGCCAAGAGGAGATGACCAAGAACCAGGTGTCCCTGACCTGCCTG
GTGAAGGGCTTCTACCCCAGCGACATCGCCGTGGAGTGGGAGAGCAACGG
CCAGCCCGAGAACAACTACAAGACCACCCCCCCTGTGCTGGACAGCGACG
GCAGCTTCTTCCTGTACAGCCGGCTGACCGTGGACAAGAGCCGGTGGCAG
GAGGGCAACGTCTTTAGCTGCTCCGTGATGCACGAGGCCCTGCACAACCA
CTACACCCAGAAGAGCCTGAGCCTGTCCCTGGGCAAGATG.

[0341] In one aspect, the hinge or spacer comprises an IgD hinge. For example, in one embodiment, the hinge or spacer comprises a hinge of the amino acid sequence RWPESPKAQASSVPTAQPQAEGSLAKATTAPATTRNTGRGGEEKKKEKEKEEQEE RETKTPECPSHTQPLGVYLLTPAVQDLWLRDKATFTCFVVGSDLKDAHLTWEVAG KVPTGGVEEGLLERHSNGSQSQHSRLTLPRSLWNAGTSVTCTLNHPSLPPQRLMAL REPAAQAPVKLSLNLLASSDPPEAASWLLCEVSGFSPPNILLMWLEDQREVNTSGF APARPPPQPGSTTFWAWSVLRVPAPPSPQPATYTCVVSHEDSRTLLNASRSLEVSYV TDH (SEQ ID NO:407). In some embodiments, the hinge or spacer comprises a hinge encoded by a nucleotide sequence of

(SEQ ID NO: 408)
AGGTGGCCCGAAAGTCCCAAGGCCCAGGCATCTAGTGTTCCTACTGCACA
GCCCCAGGCAGAAGGCAGCCTAGCCAAAGCTACTACTGCACCTGCCACTA
CGCGCAATACTGGCCGTGGCGGGGAGGAGAAGAAAAAGGAGAAAGAGAAA
GAAGAACAGGAAGAGAGGGAGACCAAGACCCCTGAATGTCCATCCCATAC
CCAGCCGCTGGGCGTCTATCTCTTGACTCCCGCAGTACAGGACTTGTGGC
TTAGAGATAAGGCCACCTTTACATGTTTCGTCGTGGGCTCTGACCTGAAG
GATGCCCATTTGACTTGGGAGGTTGCCGGAAAGGTACCCACAGGGGGGGT
TGAGGAAGGGTTGCTGGAGCGCCATTCCAATGGCTCTCAGAGCCAGCACT
CAAGACTCACCCTTCCGAGATCCCTGTGGAACGCCGGGACCTCTGTCACA
TGTACTCTAAATCATCCTAGCCTGCCCCCACAGCGTCTGATGGCCCTTAG
AGAGCCAGCCGCCCAGGCACCAGTTAAGCTTAGCCTGAATCTGCTCGCCA
GTAGTGATCCCCCAGAGGCCGCCAGCTGGCTCTTATGCGAAGTGTCCGGC
TTTAGCCCGCCCAACATCTTGCTCATGTGGCTGGAGGACCAGCGAGAAGT
GAACACCAGCGGCTTCGCTCCAGCCCGGCCCCCACCCCAGCCGGGTTCTA
CCACATTCTGGGCCTGGAGTGTCTTAAGGGTCCCAGCACCACCTAGCCCC
CAGCCAGCCACATACACCTGTGTTGTGTCCCATGAAGATAGCAGGACCCT
GCTAAATGCTTCTAGGAGTCTGGAGGTTTCCTACGTGACTGACCATT.

[0342] In one aspect, the transmembrane domain may be recombinant, in which case it will comprise predominantly hydrophobic residues such as leucine and valine. In one aspect a triplet of phenylalanine, tryptophan and valine can be found at each end of a recombinant transmembrane domain.

[0343] Optionally, a short oligo- or polypeptide linker, between 2 and 10 amino acids in length may form the linkage between the transmembrane domain and the cytoplasmic region of the CAR. A glycine-serine doublet provides a particularly suitable linker. For example, in one aspect, the linker comprises the amino acid sequence of GGGGSGGGGS (SEQ ID NO:10). In some embodiments, the linker is encoded by a nucleotide sequence of

(SEQ ID NO: 11)
GGTGGCGGAGGTTCTGGAGGTGGAGGTTCC.

[0344] In one aspect, the hinge or spacer comprises a KIR2DS2 hinge.

### Cytoplasmic Domain

[0345] The cytoplasmic domain or region of the anti-target CAR includes an intracellular signaling domain. An intracellular signaling domain is generally responsible for activation of at least one of the normal effector functions of the immune cell in which the anti-target CAR has been introduced. The term “effector function” refers to a specialized function of a cell. Effector function of a T cell, for example, may be cytolytic activity or helper activity including the secretion of cytokines. Thus the term “intracellular signaling domain” refers to the portion of a protein which transduces the effector function signal and directs the cell to perform a specialized function. While usually the entire intracellular signaling domain can be employed, in many cases it is not necessary to use the entire chain. To the extent that a truncated portion of the intracellular signaling domain is used, such truncated portion may be used in place of the intact chain as long as it transduces the effector function signal. The term intracellular signaling domain is thus meant to include any truncated portion of the intracellular signaling domain sufficient to transduce the effector function signal.

[0346] Examples of intracellular signaling domains for use in the anti-target CAR of the invention include the cytoplasmic sequences of the T cell receptor (TCR) and co-receptors that act in concert to initiate signal transduction following antigen receptor engagement, as well as any derivative or variant of these sequences and any recombinant sequence that has the same functional capability.

[0347] It is known that signals generated through the TCR alone are insufficient for full activation of the T cell and that a secondary and/or costimulatory signal is also required. Thus, T cell activation can be said to be mediated by two distinct classes of cytoplasmic signaling sequences: those that initiate antigen-dependent primary activation through the TCR (primary intracellular signaling domains) and those that act in an antigen-independent manner to provide a secondary or costimulatory signal (secondary cytoplasmic domain, e.g., a costimulatory domain).

[0348] A primary signaling domain regulates primary activation of the TCR complex either in a stimulatory way, or in an inhibitory way. Primary intracellular signaling domains that act in a stimulatory manner may contain signaling motifs which are known as immunoreceptor tyrosine-based activation motifs or ITAMs.

[0349] Examples of ITAM containing primary intracellular signaling domains that are of particular use in the invention include those of CD3 zeta, common FcR gamma (FCER1G), Fc gamma RIIa, FcR beta (Fc Epsilon Rib), CD3 gamma, CD3 delta, CD3 epsilon, CD79a, CD79b, DAP10, and DAP12. In one embodiment, a CAR of the invention comprises an intracellular signaling domain, e.g., a primary signaling domain of CD3-zeta.

[0350] In one embodiment, a primary signaling domain comprises a modified ITAM domain, e.g., a mutated ITAM domain which has altered (e.g., increased or decreased) activity as compared to the native ITAM domain. In one embodiment, a primary signaling domain comprises a modified ITAM-containing primary intracellular signaling domain, e.g., an optimized and/or truncated ITAM-containing primary intracellular signaling domain. In an embodiment, a primary signaling domain comprises one, two, three, four or more ITAM motifs.

[0351] The intracellular signalling domain of the anti-target CAR can comprise the CD3-zeta signaling domain by itself or it can be combined with any other desired intracellular signaling domain(s) useful in the context of an anti-target CAR of the invention. For example, the intracellular signaling domain of the anti-target CAR can comprise a CD3 zeta chain portion and a costimulatory signaling domain. The costimulatory signaling domain refers to a portion of the anti-target CAR comprising the intracellular domain of a costimulatory molecule. A costimulatory molecule is a cell surface molecule other than an antigen receptor or its ligands that is required for an efficient response of lymphocytes to an antigen. Examples of such molecules include CD27, CD28, 4-1BB (CD137), OX40, CD30, CD40, PD-1, ICOS, lymphocyte function-associated antigen-1 (LFA-1), CD2, CD7, LIGHT, NKG2C, B7-H3, and a ligand that specifically binds with CD83, and the like. For example, CD27 costimulation has been demonstrated to enhance expansion, effector function, and survival of human CART cells in vitro and augments human T cell persistence and antitumor activity in vivo (Song et al. Blood. 2012; 119(3):696-706). Further examples of such costimulatory molecules include CDS, ICAM-1, GITR, BAFFR, HVEM (LIGHTR), SLAMF7, NKp80 (KLRF1), NKp44, NKp30, NKp46, CD160, CD19, CD4, CD8alpha, CD8beta, IL2R beta, IL2R gamma, IL7R alpha, ITGA4, VLA1, CD49a, ITGA4, IA4, CD49D, ITGA6, VLA-6, CD49f, ITGAD, CD11d, ITGAE, CD103, ITGAL, CD11a, LFA-1, ITGAM, CD11b, ITGAX, CD11c, ITGB1, CD29, ITGB2, CD18, LFA-1, ITGB7, TNFR2, TRANCE/RANKL, DNAM1 (CD226), SLAMF4 (CD244, 2B4), CD84, CD96 (Tactile), NKG2D, CEACAM1, CRTAM, Ly9 (CD229), CD160 (BY55), PSGL1, CD100 (SEMA4D), CD69, SLAMF6 (NTB-A, Ly108), SLAM (SLAMF1, CD150, IPO-3), BLAME (SLAMF8), SELPLG (CD162), LTBR, LAT, GADS, SLP-76, PAG/Cbp, and CD19a.

[0352] The intracellular signaling sequences within the cytoplasmic portion of the anti-target CAR of the invention may be linked to each other in a random or specified order. Optionally, a short oligo- or polypeptide linker, for example, between 2 and 10 amino acids (e.g., 2, 3, 4, 5, 6, 7, 8, 9, or 10 amino acids) in length may form the linkage between intracellular signaling sequence. In one embodiment, a glycine-serine doublet can be used as a suitable linker. In one embodiment, a single amino acid, e.g., an alanine, a glycine, can be used as a suitable linker.

[0353] In one aspect, the intracellular signaling domain is designed to comprise two or more, e.g., 2, 3, 4, 5, or more, costimulatory signaling domains. In an embodiment, the two or more, e.g., 2, 3, 4, 5, or more, costimulatory signaling domains, are separated by a linker molecule, e.g., a linker molecule described herein. In one embodiment, the intracellular signaling domain comprises two costimulatory signaling domains. In some embodiments, the linker molecule is a glycine residue. In some embodiments, the linker is an alanine residue.

[0354] In one aspect, the intracellular signaling domain is designed to comprise the signaling domain of CD3-zeta. In one aspect, the intracellular signaling domain is designed to comprise the signaling domain of CD3-zeta, and the signaling domain of 4-1BB. In one aspect, the signaling domain of 4-1BB is a signaling domain of SEQ ID NO: 14. In one aspect, the signaling domain of CD3-zeta is a signaling domain of SEQ ID NO: 18.

[0355] In one aspect, the intracellular signaling domain is designed to comprise the signaling domain of CD3-zeta, and the signaling domain of CD27. In one aspect, the signaling domain of CD27 comprises an amino acid sequence of

(SEQ ID NO: 16)
QRRKYRSNKGESPVEPAEPCRYSCPREEEGSTIPIQEDYRKPEPACSP.

[0356] In one aspect, the signalling domain of CD27 is encoded by a nucleic acid sequence of

(SEQ ID NO: 17)
AGGAGTAAGAGGAGCAGGCTCCTGCACAGTGACTACATGAACATGACTCC
CCGCCGCCCCGGGCCCACCCGCAAGCATTACCAGCCCTATGCCCCACCAC
GCGACTTCGCAGCCTATCGCTCC.

[0357] In one embodiment, the anti-target CAR-expressing cell further comprises an inhibitory CAR. In one embodiment, the inhibitory CAR comprises an antigen binding domain that binds an antigen found on normal cells but not cancer cells. In one embodiment, the inhibitory CAR comprises the antigen binding domain, a transmembrane domain and an intracellular domain of an inhibitory molecule. For example, the intracellular domain of the inhibitory CAR can be an intracellular domain of PD1, PD-L1, CTLA4, TIM3, CEACAM (e.g., CEACAM-1, CEACAM-3 and/or CEACAM-5), LAG3, VISTA, BTLA, TIGIT, LAIR1, CD160, 2B4 or TGF beta.

[0358] In one embodiment, when the anti-target CAR-expressing cell comprises two or more different CARs, the extracellular domains of the different CARs can be such that the extracellular domains do not interact with one another. For example, a cell expressing a first and second CAR can have an extracellular domain of the first CAR, e.g., as a fragment, e.g., an scFv, that does not form an association with the extracellular domain of the second CAR, e.g., the antigen binding domain of the second CAR is a VHH.

[0359] In some embodiments, the ligand of an anti-target CAR comprises a single domain antigen binding (SDAB) molecules which includes molecules whose complementary determining regions are part of a single domain polypeptide. Examples include, but are not limited to, heavy chain variable domains, binding molecules naturally devoid of light chains, single domains derived from conventional 4-chain antibodies, engineered domains and single domain scaffolds other than those derived from antibodies. SDAB molecules may be any of the art, or any future single domain molecules. SDAB molecules may be derived from any species including, but not limited to mouse, human, camel, llama, lamprey, fish, shark, goat, rabbit, and bovine. This term also includes naturally occurring single domain antibody molecules from species other than Camelidae and sharks.

[0360] In one aspect, an SDAB molecule can be derived from a variable region of the immunoglobulin found in fish, such as, for example, that which is derived from the immunoglobulin isotype known as Novel Antigen Receptor (NAR) found in the serum of shark. Methods of producing single domain molecules derived from a variable region of NAR (“IgNARs”) are described in WO 03/014161 and Streltsov (2005) Protein Sci. 14:2901-2909.

[0361] According to another aspect, an SDAB molecule is a naturally occurring single domain antigen binding molecule known as heavy chain devoid of light chains. Such single domain molecules are disclosed in WO 9404678 and Hamers-Casterman, C. et al. (1993) Nature 363:446-448, for example. For clarity reasons, this variable domain derived from a heavy chain molecule naturally devoid of light chain is known herein as a VHH or nanobody to distinguish it from the conventional VH of four chain immunoglobulins. Such a VHH molecule can be derived from Camelidae species, for example in camel, llama, dromedary, alpaca and guanaco. Other species besides Camelidae may produce heavy chain molecules naturally devoid of light chain; such VHHs are within the scope of the invention.

[0362] The SDAB molecules can be recombinant, CDR-grafted, humanized, camelized, de-immunized and/or in vitro generated (e.g., selected by phage display).

[0363] In another aspect, the anti-target CAR-expressing cell described herein can further express another agent, e.g., an agent which enhances the activity of an anti-target CAR-expressing cell. For example, in one embodiment, the agent can be an agent which inhibits an inhibitory molecule. Inhibitory molecules, e.g., PD1, can, in some embodiments, decrease the ability of an anti-target CAR-expressing cell to mount an immune effector response. Examples of inhibitory molecules include PD1, PD-L1, CTLA4, TIM3, CEACAM (e.g., CEACAM-1, CEACAM-3 and/or CEACAM-5), LAG3, VISTA, BTLA, TIGIT, LAIR1, CD160, 2B4 and TGF beta. In one embodiment, the agent which inhibits an inhibitory molecule, e.g., is a molecule described herein, e.g., an agent that comprises a first polypeptide, e.g., an inhibitory molecule, associated with a second polypeptide that provides a positive signal to the cell, e.g., an intracellular signaling domain described herein. In one embodiment, the agent comprises a first polypeptide, e.g., of an inhibitory molecule such as PD1, PD-L1, CTLA4, TIM3, CEACAM (e.g., CEACAM-1, CEACAM-3 and/or CEACAM-5), LAG3, VISTA, BTLA, TIGIT, LAIR1, CD160, 2B4 or TGF beta, or a fragment of any of these (e.g., at least a portion of an extracellular domain of any of these), and a second polypeptide which is an intracellular signaling domain described herein (e.g., comprising a costimulatory domain (e.g., 41BB, CD27 or CD28, e.g., as described herein) and/or a primary signaling domain (e.g., a CD3 zeta signaling domain described herein). In one embodiment, the agent comprises a first polypeptide of PD1 or a fragment thereof (e.g., at least a portion of an extracellular domain of PD1), and a second polypeptide of an intracellular signaling domain described herein (e.g., a CD28 signaling domain described herein and/or a CD3 zeta signaling domain described herein). PD1 is an inhibitory member of the CD28 family of receptors that also includes CD28, CTLA-4, ICOS, and BTLA. PD-1 is expressed on activated B cells, T cells and myeloid cells (Agata et al. 1996 Int Immunol 8:765-75). Two ligands for PD1, PD-L1 and PD-L2 have been shown to downregulate T cell activation upon binding to PD1 (Freeman et a. 2000 J Exp Med 192:1027-34; Latchman et al. 2001 Nat Immunol 2:261-8; Carter et al. 2002 Eur J Immunol 32:634-43). PD-L1 is abundant in human cancers (Dong et al. 2003 J Mol Med 81:281-7; Blank et al. 2005 Cancer Immunol. Immunother 54:307-314; Konishi et al. 2004 Clin Cancer Res 10:5094). Immune suppression can be reversed by inhibiting the local interaction of PD1 with PD-L1.

[0364] In one embodiment, the agent comprises the extracellular domain (ECD) of an inhibitory molecule, e.g., Programmed Death 1 (PD1), fused to a transmembrane domain and intracellular signaling domains such as 41BB and CD3 zeta (also referred to herein as a PD1 CAR). In one embodiment, a PD1 CAR, when used in combinations with an anti-target CAR described herein, improves the persistence of the T cell. In one embodiment, the CAR is a PD1 CAR comprising the extracellular domain of PD1 indicated as underlined in SEQ ID NO: 26. In one embodiment, the PD1 CAR comprises the amino acid sequence of SEQ ID NO:26.

(SEQ ID NO: 26)
Malpvtalllplalllhaarppgwfldspdrpwnpptfspallvvtegdn
atftcsfsntsesfylnwyrmspsnqtdklaafpedrsqpgqdcrfrvtq
lpngrdfhmsvvrarrndsgtylcgaislapkaqikeslraelrvterra
evptahpspsprpagqfqtlvtttpaprpptpaptiasqplslrpeacrp
aaggavhtrgldfacdiyiwaplagtcgvlllslvitlyckrgrkkllyi
fkqpfmrpvqttqeedgcscrfpeeeeggcelrvkfsrsadapaykqgqn
qlynelnlgrreeydvldkrrgrdpemggkprrknpqeglynelqkdkma
eayseigmkgerrrgkghdglyqglstatkdtydalhmqalppr.

[0365] In one embodiment, the PD1 CAR comprises the amino acid sequence provided below (SEQ ID NO:39).

(SEQ ID NO: 39)
pgwfldspdrpwnpptfspallvvtegdnatftcsfsntsesfylnwyrm
spsnqtdklaafpedrsqpgqdcrfrvtqlpngrdfhmsvvrarrndsgt
ylcgaislapkaqikeshaelrvterraevptahpspsprpagqfqtlvt
ttpaprpptpaptiasqplslrpeacrpaaggavhtrgldfacdiyiwap
lagtegvlllslvitlyckrgrkkllyifkqpfmrpvqttqeedgcscrf
peeeeggcelrvkfsrsadapaykqgqnqlynelnlgrreeydvldkrrg
rdpemggkprrknpqeglynelqkdkmaeayseigmkgerrrgkghdgly
qglstatkdtydalhmqalppr.

[0366] In one embodiment, the agent comprises a nucleic acid sequence encoding the PD1 CAR, e.g., the PD1 CAR described herein. In one embodiment, the nucleic acid sequence for the PD1 CAR is shown below, with the PD1 ECD underlined below in SEQ ID NO: 27

(SEQ ID NO: 27)
atggccctccctgtcactgccctgatctccccctcgcactcctgctccac
gccgctagaccacccggatggtactggactctccggatcgcccgtggaat
cccccaaccactcaccggcactcaggagtgactgagggcgataatgcgac
cacacgtgctcgttctccaacacctccgaatcattcgtgctgaactggta
ccgcatgagcccgtcaaaccagaccgacaagctcgccgcgtaccggaaga
tcggtcgcaaccgggacaggattgtcggaccgcgtgactcaactgccgaa
tggcagagacttccacatgagcgtggtccgcgctaggcgaaacgactccg
ggacctacctgtgcggagccatctcgctggcgcctaaggcccaaatcaaa
gagagcttgagggccgaactgagagtgaccgagcgcagagctgaggtgcc
aactgcacatccatccccatcgcctcggcctgcggggcagatcagaccct
ggtcacgaccactccggcgccgcgcccaccgactccggccccaactatcg
cgagccagcccctgtcgctgaggccggaagcatgccgccctgccgccgga
ggtgctgtgcatacccggggattggacttcgcatgcgacatctacatttg
ggctcctctcgccggaacttgtggcgtgctccttctgtccctggtcatca
ccctgtactgcaagcggggtcggaaaaagcttctgtacattttcaagcag
cccttcatgaggcccgtgcaaaccacccaggaggaggacggttgctcctg
ccggttccccgaagaggaagaaggaggttgcgagctgcgcgtgaagactc
ccggagcgccgacgcccccgcctataagcagggccagaaccagctgtaca
acgaactgaacctgggacggcgggaagagtacgatgtgctggacaagcgg
cgcggccgggaccccgaaatgggcgggaagcctagaagaaagaaccctca
ggaaggcctgtataacgagctgcagaaggacaagatggccgaggcctact
ccgaaattgggatgaagggagagcggcggaggggaaaggggcacgacggc
ctgtaccaaggactgtccaccgccaccaaggacacatacgatgccctgca
catgcaggccatccccctcgc.

[0367] In one aspect, the present invention provides methods comprising administering a population of anti-target CAR-expressing cells, e.g., anti-target CAR CART cells, in combination with another agent, e.g., a kinase inhibitor, such as a kinase inhibitor described herein. In another aspect, the present invention provides methods comprising administering a population of cells wherein at least one cell in the population expresses an anti-target CAR having a ligand that binds a target CAR, and a second cell expressing another agent, e.g., an agent which enhances the activity of an anti-target CAR-expressing cell, in combination with another agent, e.g., a kinase inhibitor, such as a kinase inhibitor described herein.

### Regulatable Anti-Target CARs

[0368] In some embodiments, a regulatable anti-target CAR (atRCAR) where the anti-target CAR activity can be controlled is desirable to optimize the safety and efficacy of an anti-target CAR therapy. There are many ways anti-target CAR activities can be regulated. For example, inducible apoptosis using, e.g., a caspase fused to a dimerization domain (see, e.g., Di et al., N Egnl. J. Med. 2011 Nov. 3; 365(18):1673-1683), can be used as a safety switch in the anti-target CAR therapy of the instant invention. In an aspect, an anti-target RCAR comprises a set of polypeptides, typically two in the simplest embodiments, in which the components of a standard anti-target CAR described herein, e.g., an antigen binding domain and an intracellular signaling domain, are partitioned on separate polypeptides or members. In some embodiments, the set of polypeptides include a dimerization switch that, upon the presence of a dimerization molecule, can couple the polypeptides to one another, e.g., can couple an antigen binding domain to an intracellular signaling domain.

[0369] In an aspect, an anti-target RCAR comprises two polypeptides or members: 1) an intracellular signaling member comprising an intracellular signaling domain, e.g., a primary intracellular signaling domain described herein, and a first switch domain; 2) a ligand that binds a target CAR wherein the ligand comprises a cognate antigen or an antibody molecule, as described herein and a second switch domain. Optionally, the anti-target RCAR comprises a transmembrane domain described herein. In an embodiment, a transmembrane domain can be disposed on the intracellular signaling member, on the antigen binding member, or on both. (Unless otherwise indicated, when members or elements of an anti-target RCAR are described herein, the order can be as provided, but other orders are included as well. In other words, in an embodiment, the order is as set out in the text, but in other embodiments, the order can be different. E.g., the order of elements on one side of a transmembrane region can be different from the example, e.g., the placement of a switch domain relative to a intracellular signaling domain can be different, e.g., reversed).

[0370] In an embodiment, the first and second switch domains can form an intracellular or an extracellular dimerization switch. In an embodiment, the dimerization switch can be a homodimerization switch, e.g., where the first and second switch domain are the same, or a heterodimerization switch, e.g., where the first and second switch domain are different from one another.

[0371] In embodiments, an anti-target RCAR can comprise a “multi switch.” A multi switch can comprise heterodimerization switch domains or homodimerization switch domains. A multi switch comprises a plurality of, e.g., 2, 3, 4, 5, 6, 7, 8, 9, or 10, switch domains, independently, on a first member, e.g., a ligand member, and a second member, e.g., an intracellular signaling member. In an embodiment, the first member can comprise a plurality of first switch domains, e.g., FKBP-based switch domains, and the second member can comprise a plurality of second switch domains, e.g., FRB-based switch domains. In an embodiment, the first member can comprise a first and a second switch domain, e.g., a FKBP-based switch domain and a FRB-based switch domain, and the second member can comprise a first and a second switch domain, e.g., a FKBP-based switch domain and a FRB-based switch domain.

[0372] In an embodiment, the intracellular signaling member comprises one or more intracellular signaling domains, e.g., a primary intracellular signaling domain and one or more costimulatory signaling domains.

[0373] In an embodiment, the ligand member may comprise one or more intracellular signaling domains, e.g., one or more costimulatory signaling domains. In an embodiment, the ligand member comprises a plurality, e.g., 2 or 3 costimulatory signaling domains described herein, e.g., selected from 41BB, CD28, CD27, ICOS, and OX40, and in embodiments, no primary intracellular signaling domain. In an embodiment, the ligand member comprises the following costimulatory signaling domains, from the extracellular to intracellular direction: 41BB-CD27; 41BB-CD27; CD27-41BB; 41BB-CD28; CD28-41BB; OX40-CD28; CD28-OX40; CD28-41BB; or 41BB-CD28. In such embodiments, the intracellular binding member comprises a CD3zeta domain. In one such embodiment the anti-target RCAR comprises (1) a ligand member comprising, a ligand that binds a target CAR, a transmembrane domain, and two costimulatory domains and a first switch domain; and (2) an intracellular signaling domain comprising a transmembrane domain or membrane tethering domain and at least one primary intracellular signaling domain, and a second switch domain.

[0374] An embodiment provides anti-target RCARs wherein the ligand member is not tethered to the surface of the anti-target CAR cell. This allows a cell having an intracellular signaling member to be conveniently paired with one or more ligand members, without transforming the cell with a sequence that encodes the ligand member. In such embodiments, the anti-target RCAR comprises: 1) an intracellular signaling member comprising: a first switch domain, a transmembrane domain, an intracellular signaling domain, e.g., a primary intracellular signaling domain, and a first switch domain; and 2) a ligand member comprising: a ligand that binds a target CAR, and a second switch domain, wherein the ligand member does not comprise a transmembrane domain or membrane tethering domain, and, optionally, does not comprise an intracellular signaling domain. In some embodiments, the anti-target RCAR may further comprise 3) a second ligand member comprising: a ligand that binds a target CAR, e.g., a second ligand that binds a different target CAR than is bound by the ligand domain; and a second switch domain.

[0375] Also provided herein are anti-target RCARs wherein the ligand member comprises bispecific activation and targeting capacity. In this embodiment, the ligand member can comprise a plurality, e.g., 2, 3, 4, or 5 ligands, e.g., scFvs, wherein each ligand binds to a target CAR, e.g. different target CARs or the same target CAR, e.g., the same or different portions of the extracellular domain of the same target CAR. In an embodiment, the plurality of ligands are in tandem, and optionally, a linker or hinge region is disposed between each of the ligands. Suitable linkers and hinge regions are described herein.

[0376] An embodiment provides anti-target RCARs having a configuration that allows switching of proliferation. In this embodiment, the anti-target RCAR comprises: 1) an intracellular signaling member comprising: optionally, a transmembrane domain or membrane tethering domain; one or more co-stimulatory signaling domain, e.g., selected from 41BB, CD28, CD27, ICOS, and OX40, and a switch domain; and 2) a ligand member comprising ligand that binds to a target CAR, a transmembrane domain, and a primary intracellular signaling domain, e.g., a CD3zeta domain, wherein the ligand member does not comprise a switch domain, or does not comprise a switch domain that dimerizes with a switch domain on the intracellular signaling member. In an embodiment, the ligand member does not comprise a co-stimulatory signaling domain. In an embodiment, the intracellular signaling member comprises a switch domain from a homodimerization switch. In an embodiment, the intracellular signaling member comprises a first switch domain of a heterodimerization switch and the anti-target RCAR comprises a second intracellular signaling member which comprises a second switch domain of the heterodimerization switch. In such embodiments, the second intracellular signaling member comprises the same intracellular signaling domains as the intracellular signaling member. In an embodiment, the dimerization switch is intracellular. In an embodiment, the dimerization switch is extracellular.

[0377] In any of the anti-target RCAR configurations described here, the first and second switch domains comprise a FKBP-FRB based switch as described herein.

[0378] Also provided herein are cells comprising an anti-target RCAR described herein.

[0379] Also provided herein are nucleic acids and vectors comprising an anti-target RCAR encoding sequences. Sequence encoding various elements of an anti-target RCAR can be disposed on the same nucleic acid molecule, e.g., the same plasmid or vector, e.g., viral vector, e.g., lentiviral vector. In an embodiment, (i) sequence encoding a ligand member and (ii) sequence encoding an intracellular signaling member, can be present on the same nucleic acid, e.g., vector. Production of the corresponding proteins can be achieved, e.g., by the use of separate promoters, or by the use of a bicistronic transcription product (which can result in the production of two proteins by cleavage of a single translation product or by the translation of two separate protein products). In an embodiment, a sequence encoding a cleavable peptide, e.g., a P2A or F2A sequence, is disposed between (i) and (ii). In an embodiment, a sequence encoding an IRES, e.g., an EMCV or EV71 IRES, is disposed between (i) and (ii). In these embodiments, (i) and (ii) are transcribed as a single RNA. In an embodiment, a first promoter is operably linked to (i) and a second promoter is operably linked to (ii), such that (i) and (ii) are transcribed as separate mRNAs.

[0380] Alternatively, the sequence encoding various elements of an anti-target RCAR can be disposed on the different nucleic acid molecules, e.g., different plasmids or vectors, e.g., viral vector, e.g., lentiviral vector. E.g., the (i) sequence encoding a ligand member can be present on a first nucleic acid, e.g., a first vector, and the (ii) sequence encoding an intracellular signaling member can be present on the second nucleic acid, e.g., the second vector.

### Target CAR

[0381] In one embodiment, methods of the invention comprise a target CAR. In an embodiment, a target CAR comprises a specific binding element otherwise referred to as an antigen binding domain. The choice of moiety depends upon the type and number of ligands that define the surface of a target cell. For example, the antigen binding domain may be chosen to recognize a cell surface marker on target cells associated with a particular disease state. Thus, examples of cell surface markers that may be bound by the antigen binding domain in a CAR described herein include those associated with viral, bacterial and parasitic infections, autoimmune disease and cancer cells. In one aspect, the portion of the target CAR comprising the antigen binding domain comprises an antigen binding domain that targets a tumor antigen, e.g., a tumor antigen described herein.

[0382] The antigen binding domain can be any domain that binds to the antigen including but not limited to a monoclonal antibody, a polyclonal antibody, a recombinant antibody, a human antibody, a humanized antibody, and a functional fragment thereof, including but not limited to a single-domain antibody such as a heavy chain variable domain (VH), a light chain variable domain (VL) and a variable domain (VHH) of camelid derived nanobody, and to an alternative scaffold known in the art to function as antigen binding domain, such as a recombinant fibronectin domain, a T cell receptor (TCR), or a fragment there of, e.g., single chain TCR, and the like. In some instances, it is beneficial for the antigen binding domain to be derived from the same species in which the CAR will ultimately be used in. For example, for use in humans, it may be beneficial for the antigen binding domain of the CAR to comprise human or humanized residues for the antigen binding domain of an antibody or antibody fragment.

[0383] In one embodiment, an antigen binding domain against CD22 is an antigen binding portion, e.g., CDRs, of an antibody described in, e.g., Haso et al., Blood, 121(7): 1165-1174 (2013); Wayne et al., Clin Cancer Res 16(6): 1894-1903 (2010); Kato et al., Leuk Res 37(1):83-88 (2013); Creative BioMart (creativebiomart.net): MOM-18047-S(P).

[0384] In one embodiment, an antigen binding domain against CS-1 is an antigen binding portion, e.g., CDRs, of Elotuzumab (BMS), see e.g., Tai et al., 2008, Blood 112(4):1329 37; Tai et al., 2007, Blood. 110(5):1656-63.

[0385] In one embodiment, an antigen binding domain against CLL-1 is an antigen binding portion, e.g., CDRs, of an antibody available from R&D, ebiosciences, Abcam, for example, PE-CLL1-hu Cat #353604 (BioLegend); and PE-CLL1 (CLEC12A) Cat #562566 (BD).

[0386] In one embodiment, an antigen binding domain against CD33 is an antigen binding portion, e.g., CDRs, of an antibody described in, e.g., Bross et al., Clin Cancer Res 7(6):1490-1496 (2001) (Gemtuzumab Ozogamicin, hP67.6), Caron et al., Cancer Res 52(24):6761-6767 (1992) (Lintuzumab, HuM195), Lapusan et al., Invest New Drugs 30(3):1121-1131 (2012) (AVE9633), Aigner et al., Leukemia 27(5): 1107-1115 (2013) (AMG330, CD33 BiTE), Dutour et al., Adv hematol 2012:683065 (2012), and Pizzitola et al., Leukemia doi:10.1038/Lue.2014.62 (2014).

[0387] In one embodiment, an antigen binding domain against GD2 is an antigen binding portion, e.g., CDRs, of an antibody described in, e.g., Mujoo et al., Cancer Res. 47(4):1098 1104 (1987); Cheung et al., Cancer Res 45(6):2642-2649 (1985), Cheung et al., J Clin Oncol 5(9):1430-1440 (1987), Cheung et al., J Clin Oncol 16(9):3053-3060 (1998), Handgretinger et al., Cancer Immunol Immunother 35(3):199-204 (1992). In some embodiments, an antigen binding domain against GD2 is an antigen binding portion of an antibody selected from mAb 14.18, 14G2a, ch14.18, hu14.18, 3F8, hu3F8, 3G6, 8B6, 60C3, 10B8, ME36.1, and 8H9, see e.g., WO2012033885, WO2013040371, WO2013192294, WO2013061273, WO2013123061, WO2013074916, and WO201385552. In some embodiments, an antigen binding domain against GD2 is an antigen binding portion of an antibody described in US Publication No.: 20100150910 or PCT Publication No.: WO 2011160119.

[0388] In one embodiment, an antigen binding domain against BCMA is an antigen binding portion, e.g., CDRs, of an antibody described in, e.g., WO2012163805, WO200112812, and WO2003062401.

[0389] In one embodiment, an antigen binding domain against Tn antigen is an antigen binding portion, e.g., CDRs, of an antibody described in, e.g., U.S. Pat. No. 8,440,798, Brooks et al., PNAS 107(22):10056-10061 (2010), and Stone et al., OncoImmunology 1(6):863-873(2012).

[0390] In one embodiment, an antigen binding domain against PSMA is an antigen binding portion, e.g., CDRs, of an antibody described in, e.g., Parker et al., Protein Expr Purif 89(2):136-145 (2013), US 20110268656 (J591 ScFv); Frigerio et al, European J Cancer 49(9):2223-2232 (2013) (scFvD2B); WO 2006125481 (mAbs 3/A12, 3/E7 and 3/F11) and single chain antibody fragments (scFv A5 and D7).

[0391] In one embodiment, an antigen binding domain against ROR1 is an antigen binding portion, e.g., CDRs, of an antibody described in, e.g., Hudecek et al., Clin Cancer Res 19(12):3153-3164 (2013); WO 2011159847; and US20130101607.

[0392] In one embodiment, an antigen binding domain against FLT3 is an antigen binding portion, e.g., CDRs, of an antibody described in, e.g., WO2011076922, U.S. Pat. No. 5,777,084, EP0754230, US20090297529, and several commercial catalog antibodies (R&D, ebiosciences, Abcam).

[0393] In one embodiment, an antigen binding domain against TAG72 is an antigen binding portion, e.g., CDRs, of an antibody described in, e.g., Hombach et al., Gastroenterology 113(4):1163-1170 (1997); and Abcam ab691.

[0394] In one embodiment, an antigen binding domain against FAP is an antigen binding portion, e.g., CDRs, of an antibody described in, e.g., Ostermann et al., Clinical Cancer Research 14:4584-4592 (2008) (FAP5), US Pat. Publication No. 2009/0304718; sibrotuzumab (see e.g., Hofheinz et al., Oncology Research and Treatment 26(1), 2003); and Tran et al., J Exp Med 210(6):1125-1135 (2013).

[0395] In one embodiment, an antigen binding domain against CD38 is an antigen binding portion, e.g., CDRs, of daratumumab (see, e.g., Groen et al., Blood 116(21):1261-1262 (2010); MOR202 (see, e.g., U.S. Pat. No. 8,263,746); or antibodies described in U.S. Pat. No. 8,362,211.

[0396] In one embodiment, an antigen binding domain against CD44v6 is an antigen binding portion, e.g., CDRs, of an antibody described in, e.g., Casucci et al., Blood 122(20):3461-3472 (2013).

[0397] In one embodiment, an antigen binding domain against CEA is an antigen binding portion, e.g., CDRs, of an antibody described in, e.g., Chmielewski et al., Gastoenterology 143(4):1095-1107 (2012).

[0398] In one embodiment, an antigen binding domain against EPCAM is an antigen binding portion, e.g., CDRS, of an antibody selected from MT110, EpCAM-CD3 bispecific Ab (see, e.g., clinicaltrials.gov/ct2/show/NCT00635596); Edrecolomab; 3622W94; ING-1; and adecatumumab (MT201).

[0399] In one embodiment, an antigen binding domain against PRSS21 is an antigen binding portion, e.g., CDRs, of an antibody described in U.S. Pat. No. 8,080,650.

[0400] In one embodiment, an antigen binding domain against B7H3 is an antigen binding portion, e.g., CDRs, of an antibody MGA271 (Macrogenics).

[0401] In one embodiment, an antigen binding domain against KIT is an antigen binding portion, e.g., CDRs, of an antibody described in, e.g., U.S. Pat. No. 7,915,391, US20120288506, and several commercial catalog antibodies.

[0402] In one embodiment, an antigen binding domain against IL-13Ra2 is an antigen binding portion, e.g., CDRs, of an antibody described in, e.g., WO2008/146911, WO2004087758, several commercial catalog antibodies, and WO2004087758.

[0403] In one embodiment, an antigen binding domain against CD30 is an antigen binding portion, e.g., CDRs, of an antibody described in, e.g., U.S. Pat. No. 7,090,843 B1, and EP0805871.

[0404] In one embodiment, an antigen binding domain against GD3 is an antigen binding portion, e.g., CDRs, of an antibody described in, e.g., U.S. Pat. Nos. 7,253,263; 8,207,308; US 20120276046; EP1013761; WO2005035577; and U.S. Pat. No. 6,437,098.

[0405] In one embodiment, an antigen binding domain against CD171 is an antigen binding portion, e.g., CDRs, of an antibody described in, e.g., Hong et al., J Immunother 37(2):93-104 (2014).

[0406] In one embodiment, an antigen binding domain against IL-11Ra is an antigen binding portion, e.g., CDRs, of an antibody available from Abcam (cat #ab55262) or Novus Biologicals (cat #EPR5446). In another embodiment, an antigen binding domain again IL-11Ra is a peptide, see, e.g., Huang et al., Cancer Res 72(1):271-281 (2012).

[0407] In one embodiment, an antigen binding domain against PSCA is an antigen binding portion, e.g., CDRs, of an antibody described in, e.g., Morgenroth et al., Prostate 67(10):1121-1131 (2007) (scFv 7F5); Nejatollahi et al., J of Oncology 2013(2013), article ID 839831 (scFv C5-II); and US Pat Publication No. 20090311181.

[0408] In one embodiment, an antigen binding domain against VEGFR2 is an antigen binding portion, e.g., CDRs, of an antibody described in, e.g., Chinnasamy et al., J Clin Invest 120(11):3953-3968 (2010).

[0409] In one embodiment, an antigen binding domain against LewisY is an antigen binding portion, e.g., CDRs, of an antibody described in, e.g., Kelly et al., Cancer Biother Radiopharm 23(4):411-423 (2008) (hu3S193 Ab (scFvs)); Dolezal et al., Protein Engineering 16(1):47-56 (2003) (NC10 scFv).

[0410] In one embodiment, an antigen binding domain against CD24 is an antigen binding portion, e.g., CDRs, of an antibody described in, e.g., Maliar et al., Gastroenterology 143(5):1375-1384 (2012).

[0411] In one embodiment, an antigen binding domain against PDGFR-beta is an antigen binding portion, e.g., CDRs, of an antibody Abcam ab32570.

[0412] In one embodiment, an antigen binding domain against SSEA-4 is an antigen binding portion, e.g., CDRs, of antibody MC813 (Cell Signaling), or other commercially available antibodies.

[0413] In one embodiment, an antigen binding domain against CD20 is an antigen binding portion, e.g., CDRs, of the antibody Rituximab, Ofatumumab, Ocrelizumab, Veltuzumab, or GA101.

[0414] In one embodiment, an antigen binding domain against Folate receptor alpha is an antigen binding portion, e.g., CDRs, of the antibody IMGN853, or an antibody described in US20120009181; U.S. Pat. No. 4,851,332, LK26: U.S. Pat. No. 5,952,484.

[0415] In one embodiment, an antigen binding domain against ERBB2 (Her2/neu) is an antigen binding portion, e.g., CDRs, of the antibody trastuzumab, or pertuzumab.

[0416] In one embodiment, an antigen binding domain against MUC1 is an antigen binding portion, e.g., CDRs, of the antibody SAR566658.

[0417] In one embodiment, the antigen binding domain against EGFR is antigen binding portion, e.g., CDRs, of the antibody cetuximab, panitumumab, zalutumumab, nimotuzumab, or matuzumab.

[0418] In one embodiment, an antigen binding domain against NCAM is an antigen binding portion, e.g., CDRs, of the antibody clone 2-2B: MAB5324 (EMD Millipore) In one embodiment, an antigen binding domain against Ephrin B2 is an antigen binding portion, e.g., CDRs, of an antibody described in, e.g., Abengozar et al., Blood 119(19):4565-4576 (2012).

[0419] In one embodiment, an antigen binding domain against IGF-I receptor is an antigen binding portion, e.g., CDRs, of an antibody described in, e.g., U.S. Pat. No. 8,344,112 B2; EP2322550 A1; WO 2006/138315, or PCT/US2006/022995.

[0420] In one embodiment, an antigen binding domain against CAIX is an antigen binding portion, e.g., CDRs, of the antibody clone 303123 (R&D Systems).

[0421] In one embodiment, an antigen binding domain against LMP2 is an antigen binding portion, e.g., CDRs, of an antibody described in, e.g., U.S. Pat. No. 7,410,640, or US20050129701.

[0422] In one embodiment, an antigen binding domain against gp100 is an antigen binding portion, e.g., CDRs, of the antibody HMB45, NKIbetaB, or an antibody described in WO2013165940, or US20130295007

[0423] In one embodiment, an antigen binding domain against tyrosinase is an antigen binding portion, e.g., CDRs, of an antibody described in, e.g., U.S. Pat. No. 5,843,674; or U.S. Ser. No. 19/950,504048.

[0424] In one embodiment, an antigen binding domain against EphA2 is an antigen binding portion, e.g., CDRs, of an antibody described in, e.g., Yu et al., Mol Ther 22(1):102-111 (2014).

[0425] In one embodiment, an antigen binding domain against GD3 is an antigen binding portion, e.g., CDRs, of an antibody described in, e.g., U.S. Pat. Nos. 7,253,263; 8,207,308; US 20120276046; EP1013761 A3; 20120276046; WO2005035577; or U.S. Pat. No. 6,437,098.

[0426] In one embodiment, an antigen binding domain against fucosyl GM1 is an antigen binding portion, e.g., CDRs, of an antibody described in, e.g., US20100297138; or WO2007/067992.

[0427] In one embodiment, an antigen binding domain against sLe is an antigen binding portion, e.g., CDRs, of the antibody G193 (for lewis Y), see Scott A M et al, Cancer Res 60: 3254-61 (2000), also as described in Neeson et al, J Immunol May 2013 190 (Meeting Abstract Supplement) 177.10.

[0428] In one embodiment, an antigen binding domain against GM3 is an antigen binding portion, e.g., CDRs, of the antibody CA 2523449 (mAb 14F7).

[0429] In one embodiment, an antigen binding domain against HMWMAA is an antigen binding portion, e.g., CDRs, of an antibody described in, e.g., Kmiecik et al., Oncoimmunology 3(1):e27185 (2014) (PMID: 24575382) (mAb9.2.27); U.S. Pat. No. 6,528,481; WO2010033866; or US 20140004124.

[0430] In one embodiment, an antigen binding domain against o-acetyl-GD2 is an antigen binding portion, e.g., CDRs, of the antibody 8B6.

[0431] In one embodiment, an antigen binding domain against TEM1/CD248 is an antigen binding portion, e.g., CDRs, of an antibody described in, e.g., Marty et al., Cancer Lett 235(2):298-308 (2006); Zhao et al., J Immunol Methods 363(2):221-232 (2011).

[0432] In one embodiment, an antigen binding domain against CLDN6 is an antigen binding portion, e.g., CDRs, of the antibody IMAB027 (Ganymed Pharmaceuticals), see e.g., clinicaltrial.gov/show/NCT02054351.

[0433] In one embodiment, an antigen binding domain against TSHR is an antigen binding portion, e.g., CDRs, of an antibody described in, e.g., U.S. Pat. Nos. 8,603,466; 8,501,415; or U.S. Pat. No. 8,309,693.

[0434] In one embodiment, an antigen binding domain against GPRC5D is an antigen binding portion, e.g., CDRs, of the antibody FAB6300A (R&D Systems); or LS-A4180 (Lifespan Biosciences).

[0435] In one embodiment, an antigen binding domain against CD97 is an antigen binding portion, e.g., CDRs, of an antibody described in, e.g., U.S. Pat. No. 6,846,911; de Groot et al., J Immunol 183(6):4127-4134 (2009); or an antibody from R&D:MAB3734.

[0436] In one embodiment, an antigen binding domain against ALK is an antigen binding portion, e.g., CDRs, of an antibody described in, e.g., Mino-Kenudson et al., Clin Cancer Res 16(5):1561-1571 (2010).

[0437] In one embodiment, an antigen binding domain against polysialic acid is an antigen binding portion, e.g., CDRs, of an antibody described in, e.g., Nagae et al., J Biol Chem 288(47):33784-33796 (2013).

[0438] In one embodiment, an antigen binding domain against PLAC1 is an antigen binding portion, e.g., CDRs, of an antibody described in, e.g., Ghods et al., Biotechnol Appl Biochem 2013 doi:10.1002/bab.1177.

[0439] In one embodiment, an antigen binding domain against GloboH is an antigen binding portion of the antibody VK9; or an antibody described in, e.g., Kudryashov V et al, Glycoconj J.15(3):243-9 (1998), Lou et al., Proc Natl Acad Sci USA 111(7):2482-2487 (2014); MBr1: Bremer E-G et al. J Biol Chem 259:14773-14777 (1984).

[0440] In one embodiment, an antigen binding domain against NY-BR-1 is an antigen binding portion, e.g., CDRs of an antibody described in, e.g., Jager et al., Appl Immunohistochem Mol Morphol 15(1):77-83 (2007).

[0441] In one embodiment, an antigen binding domain against WT-1 is an antigen binding portion, e.g., CDRs, of an antibody described in, e.g., Dao et al., Sci Transl Med 5(176):176ra33 (2013); or WO2012/135854.

[0442] In one embodiment, an antigen binding domain against MAGE-A1 is an antigen binding portion, e.g., CDRs, of an antibody described in, e.g., Willemsen et al., J Immunol 174(12):7853-7858 (2005) (TCR-like scFv).

[0443] In one embodiment, an antigen binding domain against sperm protein 17 is an antigen binding portion, e.g., CDRs, of an antibody described in, e.g., Song et al., Target Oncol Aug. 14, 2013 (PMID: 23943313); Song et al., Med Oncol 29(4):2923-2931 (2012).

[0444] In one embodiment, an antigen binding domain against Tie 2 is an antigen binding portion, e.g., CDRs, of the antibody AB33 (Cell Signaling Technology).

[0445] In one embodiment, an antigen binding domain against MAD-CT-2 is an antigen binding portion, e.g., CDRs, of an antibody described in, e.g., PMID: 2450952; U.S. Pat. No. 7,635,753.

[0446] In one embodiment, an antigen binding domain against Fos-related antigen 1 is an antigen binding portion, e.g., CDRs, of the antibody 12F9 (Novus Biologicals).

[0447] In one embodiment, an antigen binding domain against MelanA/MART1 is an antigen binding portion, e.g., CDRs, of an antibody described in, EP2514766 A2; or U.S. Pat. No. 7,749,719.

[0448] In one embodiment, an antigen binding domain against sarcoma translocation breakpoints is an antigen binding portion, e.g., CDRs, of an antibody described in, e.g., Luo et al, EMBO Mol. Med. 4(6):453-461 (2012).

[0449] In one embodiment, an antigen binding domain against TRP-2 is an antigen binding portion, e.g., CDRs, of an antibody described in, e.g., Wang et al, J Exp Med. 184(6):2207-16 (1996).

[0450] In one embodiment, an antigen binding domain against CYP1B1 is an antigen binding portion, e.g., CDRs, of an antibody described in, e.g., Maecker et al, Blood 102 (9): 3287-3294 (2003).

[0451] In one embodiment, an antigen binding domain against RAGE-1 is an antigen binding portion, e.g., CDRs, of the antibody MAB5328 (EMD Millipore).

[0452] In one embodiment, an antigen binding domain against human telomerase reverse transcriptase is an antigen binding portion, e.g., CDRs, of the antibody cat no: LS-B95-100 (Lifespan Biosciences)

[0453] In one embodiment, an antigen binding domain against intestinal carboxyl esterase is an antigen binding portion, e.g., CDRs, of the antibody 4F12: cat no: LS-B6190-50 (Lifespan Biosciences).

[0454] In one embodiment, an antigen binding domain against mut hsp70-2 is an antigen binding portion, e.g., CDRs, of the antibody Lifespan Biosciences: monoclonal: cat no: LS-C133261-100 (Lifespan Biosciences).

[0455] In one embodiment, an antigen binding domain against CD79a is an antigen binding portion, e.g., CDRs, of the antibody Anti-CD79a antibody [HM47/A9] (ab3121), available from Abcam; antibody CD79A Antibody #3351 available from Cell Signalling Technology; or antibody HPA017748-Anti-CD79A antibody produced in rabbit, available from Sigma Aldrich.

[0456] In one embodiment, an antigen binding domain against CD79b is an antigen binding portion, e.g., CDRs, of the antibody polatuzumab vedotin, anti-CD79b described in Dornan et al., “Therapeutic potential of an anti-CD79b antibody-drug conjugate, anti-CD79b-vc-MMAE, for the treatment of non-Hodgkin lymphoma” Blood. Sep. 24, 2009; 114(13):2721-9. doi: 10.1182/blood-2009-02-205500. Epub Jul. 24, 2009, or the bispecific antibody Anti-CD79b/CD3 described in “4507 Pre-Clinical Characterization of T Cell-Dependent Bispecific Antibody Anti-CD79b/CD3 As a Potential Therapy for B Cell Malignancies” Abstracts of 56^{th} ASH Annual Meeting and Exposition, San Francisco, Calif. Dec. 6-9 2014.

[0457] In one embodiment, an antigen binding domain against CD72 is an antigen binding portion, e.g., CDRs, of the antibody J3-109 described in Myers, and Uckun, “An anti-CD72 immunotoxin against therapy-refractory B-lineage acute lymphoblastic leukemia.” Leuk Lymphoma. 1995 June; 18(1-2):119-22, or anti-CD72 (10D6.8.1, mIgG1) described in Poison et al., “Antibody-Drug Conjugates for the Treatment of Non-Hodgkin's Lymphoma: Target and Linker-Drug Selection” Cancer Res Mar. 15, 2009 69; 2358.

[0458] In one embodiment, an antigen binding domain against LAIR1 is an antigen binding portion, e.g., CDRs, of the antibody ANT-301 LAIR1 antibody, available from ProSpec; or anti-human CD305 (LAIR1) Antibody, available from BioLegend.

[0459] In one embodiment, an antigen binding domain against FCAR is an antigen binding portion, e.g., CDRs, of the antibody CD89/FCARAntibody (Catalog #10414-H08H), available from Sino Biological Inc.

[0460] In one embodiment, an antigen binding domain against LILRA2 is an antigen binding portion, e.g., CDRs, of the antibody LILRA2 monoclonal antibody (M17), clone 3C7, available from Abnova, or Mouse Anti-LILRA2 antibody, Monoclonal (2D7), available from Lifespan Biosciences.

[0461] In one embodiment, an antigen binding domain against CD300LF is an antigen binding portion, e.g., CDRs, of the antibody Mouse Anti-CMRF35-like molecule 1 antibody, Monoclonal[UP-D2], available from BioLegend, or Rat Anti-CMRF35-like molecule 1 antibody, Monoclonal[234903], available from R&D Systems.

[0462] In one embodiment, an antigen binding domain against CLEC12A is an antigen binding portion, e.g., CDRs, of the antibody Bispecific T cell Engager (BiTE) scFv-antibody and ADC described in Noordhuis et al., “Targeting of CLEC12A In Acute Myeloid Leukemia by Antibody-Drug-Conjugates and Bispecific CLL-1×CD3 BiTE Antibody” 53^{rd} ASH Annual Meeting and Exposition, Dec. 10-13, 2011, and MCLA-117 (Merus).

[0463] In one embodiment, an antigen binding domain against BST2 (also called CD317) is an antigen binding portion, e.g., CDRs, of the antibody Mouse Anti-CD317 antibody, Monoclonal[3H4], available from Antibodies-Online or Mouse Anti-CD317 antibody, Monoclonal[696739], available from R&D Systems.

[0464] In one embodiment, an antigen binding domain against EMR2 (also called CD312) is an antigen binding portion, e.g., CDRs, of the antibody Mouse Anti-CD312 antibody, Monoclonal[LS-B8033] available from Lifespan Biosciences, or Mouse Anti-CD312 antibody, Monoclonal[494025] available from R&D Systems.

[0465] In one embodiment, an antigen binding domain against LY75 is an antigen binding portion, e.g., CDRs, of the antibody Mouse Anti-Lymphocyte antigen 75 antibody, Monoclonal[HD30] available from EMD Millipore or Mouse Anti-Lymphocyte antigen 75 antibody, Monoclonal[A15797] available from Life Technologies.

[0466] In one embodiment, an antigen binding domain against GPC3 is an antigen binding portion, e.g., CDRs, of the antibody hGC33 described in Nakano K, Ishiguro T, Konishi H, et al. Generation of a humanized anti-glypican 3 antibody by CDR grafting and stability optimization. Anticancer Drugs. 2010 November; 21(10):907-916, or MDX-1414, HN3, or YP7, all three of which are described in Feng et al., “Glypican-3 antibodies: a new therapeutic target for liver cancer.” FEBS Lett. Jan. 21, 2013; 588(2):377-82.

[0467] In one embodiment, an antigen binding domain against FCRL5 is an antigen binding portion, e.g., CDRs, of the anti-FcRL5 antibody described in Elkins et al., “FcRL5 as a target of antibody-drug conjugates for the treatment of multiple myeloma” Mol Cancer Ther. 2012 October; 11(10):2222-32.

[0468] In one embodiment, an antigen binding domain against IGLL1 is an antigen binding portion, e.g., CDRs, of the antibody Mouse Anti-Immunoglobulin lambda-like polypeptide 1 antibody, Monoclonal[AT1G4] available from Lifespan Biosciences, Mouse Anti-Immunoglobulin lambda-like polypeptide 1 antibody, Monoclonal[HSL11] available from BioLegend.

[0469] In one embodiment, the antigen binding domain comprises one, two three (e.g., all three) heavy chain CDRs, HC CDR1, HC CDR2 and HC CDR3, from an antibody listed above, and/or one, two, three (e.g., all three) light chain CDRs, LC CDR1, LC CDR2 and LC CDR3, from an antibody listed above. In one embodiment, the antigen binding domain comprises a heavy chain variable region and/or a variable light chain region of an antibody listed above.

[0470] In another aspect, the antigen binding domain comprises a humanized antibody or an antibody fragment. In some aspects, a non-human antibody is humanized, where specific sequences or regions of the antibody are modified to increase similarity to an antibody naturally produced in a human or fragment thereof. In one aspect, the antigen binding domain is humanized.

[0471] A humanized antibody can be produced using a variety of techniques known in the art, including but not limited to, CDR-grafting (see, e.g., European Patent No. EP 239,400; International Publication No. WO 91/09967; and U.S. Pat. Nos. 5,225,539, 5,530,101, and 5,585,089, each of which is incorporated herein in its entirety by reference), veneering or resurfacing (see, e.g., European Patent Nos. EP 592,106 and EP 519,596; Padlan, 1991, Molecular Immunology, 28(4/5):489-498; Studnicka et al., 1994, Protein Engineering, 7(6):805-814; and Roguska et al., 1994, PNAS, 91:969-973, each of which is incorporated herein by its entirety by reference), chain shuffling (see, e.g., U.S. Pat. No. 5,565,332, which is incorporated herein in its entirety by reference), and techniques disclosed in, e.g., U.S. Patent Application Publication No. US2005/0042664, U.S. Patent Application Publication No. US2005/0048617, U.S. Pat. Nos. 6,407,213, 5,766,886, International Publication No. WO 9317105, Tan et al., J. Immunol., 169:1119-25 (2002), Caldas et al., Protein Eng., 13(5):353-60 (2000), Morea et al., Methods, 20(3):267-79 (2000), Baca et al., J. Biol. Chem., 272(16):10678-84 (1997), Roguska et al., Protein Eng., 9(10):895-904 (1996), Couto et al., Cancer Res., 55 (23 Supp):5973s-5977s (1995), Couto et al., Cancer Res., 55(8):1717-22 (1995), Sandhu J S, Gene, 150(2):409-10 (1994), and Pedersen et al., J. Mol. Biol., 235(3):959-73 (1994), each of which is incorporated herein in its entirety by reference. Often, framework residues in the framework regions will be substituted with the corresponding residue from the CDR donor antibody to alter, for example improve, antigen binding. These framework substitutions are identified by methods well-known in the art, e.g., by modeling of the interactions of the CDR and framework residues to identify framework residues important for antigen binding and sequence comparison to identify unusual framework residues at particular positions. (See, e.g., Queen et al., U.S. Pat. No. 5,585,089; and Riechmann et al., 1988, Nature, 332:323, which are incorporated herein by reference in their entireties.)

[0472] A humanized antibody or antibody fragment has one or more amino acid residues remaining in it from a source which is nonhuman. These nonhuman amino acid residues are often referred to as “import” residues, which are typically taken from an “import” variable domain. As provided herein, humanized antibodies or antibody fragments comprise one or more CDRs from nonhuman immunoglobulin molecules and framework regions wherein the amino acid residues comprising the framework are derived completely or mostly from human germline. Multiple techniques for humanization of antibodies or antibody fragments are well-known in the art and can essentially be performed following the method of Winter and co-workers (Jones et al., Nature, 321:522-525 (1986); Riechmann et al., Nature, 332:323-327 (1988); Verhoeyen et al., Science, 239:1534-1536 (1988)), by substituting rodent CDRs or CDR sequences for the corresponding sequences of a human antibody, i.e., CDR-grafting (EP 239,400; PCT Publication No. WO 91/09967; and U.S. Pat. Nos. 4,816,567; 6,331,415; 5,225,539; 5,530,101; 5,585,089; 6,548,640, the contents of which are incorporated herein by reference herein in their entirety). In such humanized antibodies and antibody fragments, substantially less than an intact human variable domain has been substituted by the corresponding sequence from a nonhuman species. Humanized antibodies are often human antibodies in which some CDR residues and possibly some framework (FR) residues are substituted by residues from analogous sites in rodent antibodies. Humanization of antibodies and antibody fragments can also be achieved by veneering or resurfacing (EP 592,106; EP 519,596; Padlan, 1991, Molecular Immunology, 28(4/5):489-498; Studnicka et al., Protein Engineering, 7(6):805-814 (1994); and Roguska et al., PNAS, 91:969-973 (1994)) or chain shuffling (U.S. Pat. No. 5,565,332), the contents of which are incorporated herein by reference herein in their entirety.

[0473] The choice of human variable domains, both light and heavy, to be used in making the humanized antibodies is to reduce antigenicity. According to the so-called “best-fit” method, the sequence of the variable domain of a rodent antibody is screened against the entire library of known human variable-domain sequences. The human sequence which is closest to that of the rodent is then accepted as the human framework (FR) for the humanized antibody (Sims et al., J. Immunol., 151:2296 (1993); Chothia et al., J. Mol. Biol., 196:901 (1987), the contents of which are incorporated herein by reference herein in their entirety). Another method uses a particular framework derived from the consensus sequence of all human antibodies of a particular subgroup of light or heavy chains. The same framework may be used for several different humanized antibodies (see, e.g., Nicholson et al. Mol. Immun 34 (16-17): 1157-1165 (1997); Carter et al., Proc. Natl. Acad. Sci. USA, 89:4285 (1992); Presta et al., J. Immunol., 151:2623 (1993), the contents of which are incorporated herein by reference herein in their entirety). In some embodiments, the framework region, e.g., all four framework regions, of the heavy chain variable region are derived from a VH4_4-59 germline sequence. In one embodiment, the framework region can comprise, one, two, three, four or five modifications, e.g., substitutions, e.g., from the amino acid at the corresponding murine sequence. In one embodiment, the framework region, e.g., all four framework regions of the light chain variable region are derived from a VK3_1.25 germline sequence. In one embodiment, the framework region can comprise, one, two, three, four or five modifications, e.g., substitutions, e.g., from the amino acid at the corresponding murine sequence.

[0474] In some aspects, the portion of a CAR composition of the invention that comprises an antibody fragment is humanized with retention of high affinity for the target antigen and other favorable biological properties. According to one aspect of the invention, humanized antibodies and antibody fragments are prepared by a process of analysis of the parental sequences and various conceptual humanized products using three-dimensional models of the parental and humanized sequences. Three-dimensional immunoglobulin models are commonly available and are familiar to those skilled in the art. Computer programs are available which illustrate and display probable three-dimensional conformational structures of selected candidate immunoglobulin sequences. Inspection of these displays permits analysis of the likely role of the residues in the functioning of the candidate immunoglobulin sequence, e.g., the analysis of residues that influence the ability of the candidate immunoglobulin to bind the target antigen. In this way, FR residues can be selected and combined from the recipient and import sequences so that the desired antibody or antibody fragment characteristic, such as increased affinity for the target antigen, is achieved. In general, the CDR residues are directly and most substantially involved in influencing antigen binding.

[0475] A humanized antibody or antibody fragment may retain a similar antigenic specificity as the original antibody, e.g., in the present invention, the ability to bind human a cancer associated antigen as described herein. In some embodiments, a humanized antibody or antibody fragment may have improved affinity and/or specificity of binding to human a cancer associated antigen as described herein.

[0476] In one aspect, the antigen binding domain of the invention is characterized by particular functional features or properties of an antibody or antibody fragment. For example, in one aspect, the portion of a CAR composition of the invention that comprises an antigen binding domain specifically binds a tumor antigen as described herein.

[0477] In one aspect, the anti-cancer associated antigen as described herein binding domain is a fragment, e.g., a single chain variable fragment (scFv). In one aspect, the anti-cancer associated antigen as described herein binding domain is a Fv, a Fab, a (Fab′)2, or a bi-functional (e.g. bi-specific) hybrid antibody (e.g., Lanzavecchia et al., Eur. J. Immunol. 17, 105 (1987)). In one aspect, the antibodies and fragments thereof of the invention binds a cancer associated antigen as described herein protein with wild-type or enhanced affinity.

[0478] In some instances, scFvs can be prepared according to method known in the art (see, for example, Bird et al., (1988) Science 242:423-426 and Huston et al., (1988) Proc. Natl. Acad. Sci. USA 85:5879-5883). ScFv molecules can be produced by linking VH and VL regions together using flexible polypeptide linkers. The scFv molecules comprise a linker (e.g., a Ser-Gly linker) with an optimized length and/or amino acid composition. The linker length can greatly affect how the variable regions of a scFv fold and interact. In fact, if a short polypeptide linker is employed (e.g., between 5-10 amino acids) intrachain folding is prevented. Interchain folding is also required to bring the two variable regions together to form a functional epitope binding site. For examples of linker orientation and size see, e.g., Hollinger et al. 1993 Proc Natl Acad. Sci. U.S.A. 90:6444-6448, U.S. Patent Application Publication Nos. 2005/0100543, 2005/0175606, 2007/0014794, and PCT publication Nos. WO2006/020258 and WO2007/024715, is incorporated herein by reference.

[0479] An scFv can comprise a linker of at least 1, 2, 3, 4, 5, 6, 7, 8, 9, 10, 11, 12, 13, 14, 15, 16, 17, 18, 19, 20, 25, 30, 35, 40, 45, 50, or more amino acid residues between its VL and VH regions. The linker sequence may comprise any naturally occurring amino acid. In some embodiments, the linker sequence comprises amino acids glycine and serine. In another embodiment, the linker sequence comprises sets of glycine and serine repeats such as (Gly₄Ser)n, where n is a positive integer equal to or greater than 1 (SEQ ID NO:22). In one embodiment, the linker can be (Gly₄Ser)₄ (SEQ ID NO:29) or (Gly₄Ser)₃(SEQ ID NO:30). Variation in the linker length may retain or enhance activity, giving rise to superior efficacy in activity studies.

[0480] In another aspect, the antigen binding domain is a T cell receptor (“TCR”), or a fragment thereof, for example, a single chain TCR (scTCR). Methods to make such TCRs are known in the art. See, e.g., Willemsen R A et al, Gene Therapy 7: 1369-1377 (2000); Zhang T et al, Cancer Gene Ther 11: 487-496 (2004); Aggen et al, Gene Ther. 19(4):365-74 (2012) (references are incorporated herein by its entirety). For example, scTCR can be engineered that contains the Vα and Vβ genes from a T cell clone linked by a linker (e.g., a flexible peptide). This approach is very useful to cancer associated target that itself is intracellar, however, a fragment of such antigen (peptide) is presented on the surface of the cancer cells by MHC.

[0481] In one embodiment, an antigen binding domain against EGFRvIII is an antigen binding portion, e.g., CDRs, of a CAR, antibody or antigen-binding fragment thereof described in, e.g., PCT publication WO2014/130657 or US2014/0322275A1. In one embodiment, the CAR molecule comprises an EGFRvIII CAR, or an antigen binding domain according to Table 2 or SEQ ID NO:11 of WO 2014/130657, incorporated herein by reference, or a sequence substantially identical thereto (e.g., at least 85%, 90%, 95% or more identical thereto). The amino acid and nucleotide sequences encoding the EGFRvIII CAR molecules and antigen binding domains (e.g., including one, two, three VH CDRs; and one, two, three VL CDRs according to Kabat or Chothia), are specified in WO 2014/130657.

[0482] In one embodiment, an antigen binding domain against mesothelin is an antigen binding portion, e.g., CDRs, of an antibody, antigen-binding fragment or CAR described in, e.g., PCT publication WO2015/090230. In one embodiment, an antigen binding domain against mesothelin is an antigen binding portion, e.g., CDRs, of an antibody, antigen-binding fragment, or CAR described in, e.g., PCT publication WO1997/025068, WO1999/028471, WO2005/014652, WO2006/099141, WO2009/045957, WO2009/068204, WO2013/142034, WO2013/040557, or WO2013/063419.

[0483] In an embodiment, the CAR molecule comprises a mesothelin CAR described herein, e.g., a mesothelin CAR described in WO 2015/090230, incorporated herein by reference. In embodiments, the mesothelin CAR comprises an amino acid, or has a nucleotide sequence shown in WO 2015/090230 incorporated herein by reference, or a sequence substantially identical to any of the aforesaid sequences (e.g., at least 85%, 90%, 95% or more identical to any of the aforesaid mesothelin CAR sequences). In one embodiment, the CAR molecule comprises a mesothelin CAR, or an antigen binding domain according to Tables 2-3 of WO 2015/090230, incorporated herein by reference, or a sequence substantially identical thereto (e.g., at least 85%, 90%, 95% or more identical thereto). The amino acid and nucleotide sequences encoding the mesothelin CAR molecules and antigen binding domains (e.g., including one, two, three VH CDRs; and one, two, three VL CDRs according to Kabat or Chothia), are specified in WO 2015/090230.

[0484] In one embodiment, an antigen binding domain against CD123 is an antigen binding portion, e.g., CDRs, of an antibody, antigen-binding fragment or CAR described in, e.g., PCT publication WO2016/028896. In one embodiment, an antigen binding domain against CD123 is an antigen binding portion, e.g., CDRs, of an antibody, antigen-binding fragment or CAR described in, e.g., PCT publication WO2014/130635. In one embodiment, an antigen binding domain against CD123 is an antigen binding portion, e.g., CDRs, of an antibody, antigen-binding fragment, or CAR described in, e.g., PCT publication WO2014/138805, WO2014/138819, WO2013/173820, WO2014/144622, WO2001/66139, WO2010/126066, WO2014/144622, or US2009/0252742.

[0485] In one embodiment, an antigen binding domain against CD123 is an antigen binding portion, e.g., CDRs, of an antibody, antigen-binding fragment or CAR described in, e.g., US2014/0322212A1 or US2016/0068601A1, both incorporated herein by reference. In embodiments, the CD123 CAR comprises an amino acid, or has a nucleotide sequence shown in US2014/0322212A1 or US2016/0068601A1, both incorporated herein by reference, or a sequence substantially identical to any of the aforesaid sequences (e.g., at least 85%, 90%, 95% or more identical to any of the aforesaid CD123 CAR sequences). In one embodiment, the CAR molecule comprises a CD123 CAR (e.g., any of the CAR1-CARE), or an antigen binding domain according to Tables 1-2 of WO 2014/130635, incorporated herein by reference, or a sequence substantially identical thereto (e.g., at least 85%, 90%, 95% or more identical to any of the aforesaid CD123 CAR sequences). The amino acid and nucleotide sequences encoding the CD123 CAR molecules and antigen binding domains (e.g., including one, two, three VH CDRs; and one, two, three VL CDRs according to Kabat or Chothia), are specified in WO 2014/130635.

[0486] In other embodiments, the CAR molecule comprises a CD123 CAR comprises a CAR molecule (e.g., any of the CAR123-1 to CAR123-4 and hzCAR123-1 to hzCAR123-32), or an antigen binding domain according to Tables 2, 6, and 9 of WO2016/028896, incorporated herein by reference, or a sequence substantially identical thereto (e.g., at least 85%, 90%, 95% or more identical to any of the aforesaid CD123 CAR sequences). The amino acid and nucleotide sequences encoding the CD123 CAR molecules and antigen binding domains (e.g., including one, two, three VH CDRs; and one, two, three VL CDRs according to Kabat or Chothia), are specified in WO2016/028896.

[0487] In one embodiment, an antigen binding domain against CD22 is an antigen binding portion, e.g., CDRs, of an antibody described in, e.g., Haso et al., Blood, 121(7): 1165-1174 (2013); Wayne et al., Clin Cancer Res 16(6): 1894-1903 (2010); Kato et al., Leuk Res 37(1):83-88 (2013); Creative BioMart (creativebiomart.net): MOM-18047-S(P).

[0488] In one embodiment, an antigen binding domain against CS-1 is an antigen binding portion, e.g., CDRs, of Elotuzumab (BMS), see e.g., Tai et al., 2008, Blood 112(4):1329-37; Tai et al., 2007, Blood. 110(5):1656-63.

[0489] In one embodiment, an antigen binding domain against CLL-1 is an antigen binding portion, e.g., CDRs, of an antibody available from R&D, ebiosciences, Abcam, for example, PE-CLL1-hu Cat #353604 (BioLegend); and PE-CLL1 (CLEC12A) Cat #562566 (BD).

[0490] In other embodiments, the CLL1 CAR includes a CAR molecule, or an antigen binding domain according to Table 2 of WO2016/014535, incorporated herein by reference. The amino acid and nucleotide sequences encoding the CLL-1 CAR molecules and antigen binding domains (e.g., including one, two, three VH CDRs; and one, two, three VL CDRs according to Kabat or Chothia), are specified in WO2016/014535.

[0491] In one embodiment, an antigen binding domain against CD33 is an antigen binding portion, e.g., CDRs, of an antibody described in, e.g., Bross et al., Clin Cancer Res 7(6):1490-1496 (2001) (Gemtuzumab Ozogamicin, hP67.6), Caron et al., Cancer Res 52(24):6761-6767 (1992) (Lintuzumab, HuM195), Lapusan et al., Invest New Drugs 30(3):1121-1131 (2012) (AVE9633), Aigner et al., Leukemia 27(5): 1107-1115 (2013) (AMG330, CD33 BiTE), Dutour et al., Adv hematol 2012:683065 (2012), and Pizzitola et al., Leukemia doi:10.1038/Lue.2014.62 (2014).

[0492] In one embodiment, an antigen binding domain against CD33 is an antigen binding portion, e.g., CDRs, of an antibody described in, US2016/0096892A1, incorporated herein by reference. In embodiments, the CD33 CAR comprises an amino acid, or has a nucleotide sequence shown in US2016/0096892A1, incorporated herein by reference, or a sequence substantially identical to any of the aforesaid sequences (e.g., at least 85%, 90%, 95% or more identical to any of the aforesaid CD33 CAR sequences). In other embodiments, the CD33 CAR CAR or antigen binding domain thereof can include a CAR molecule (e.g., any of CAR33-1 to CAR-33-9), or an antigen binding domain according to Table 2 or 9 of WO2016/014576, incorporated herein by reference, or a sequence substantially identical to any of the aforesaid sequences (e.g., at least 85%, 90%, 95% or more identical to any of the aforesaid CD33 CAR sequences). The amino acid and nucleotide sequences encoding the CD33 CAR molecules and antigen binding domains (e.g., including one, two, three VH CDRs; and one, two, three VL CDRs according to Kabat or Chothia), are specified in WO2016/014576.

[0493] In one embodiment, an antigen binding domain against GD2 is an antigen binding portion, e.g., CDRs, of an antibody described in, e.g., Mujoo et al., Cancer Res. 47(4):1098-1104 (1987); Cheung et al., Cancer Res 45(6):2642-2649 (1985), Cheung et al., J Clin Oncol 5(9):1430-1440 (1987), Cheung et al., J Clin Oncol 16(9):3053-3060 (1998), Handgretinger et al., Cancer Immunol Immunother 35(3):199-204 (1992). In some embodiments, an antigen binding domain against GD2 is an antigen binding portion of an antibody selected from mAb 14.18, 14G2a, ch14.18, hu14.18, 3F8, hu3F8, 3G6, 8B6, 60C3, 10B8, ME36.1, and 8H9, see e.g., WO2012033885, WO2013040371, WO2013192294, WO2013061273, WO2013123061, WO2013074916, and WO201385552. In some embodiments, an antigen binding domain against GD2 is an antigen binding portion of an antibody described in US Publication No.: 20100150910 or PCT Publication No.: WO 2011160119.

[0494] In one embodiment, an antigen binding domain against BCMA is an antigen binding portion, e.g., CDRs, of an antibody, antigen-binding fragment or CAR described in, e.g., PCT publication WO2016/014565, e.g., the antigen binding portion of CAR BCMA-10 as described in WO2016/014565. In one embodiment, an antigen binding domain against BCMA is an antigen binding portion, e.g., CDRs, of an antibody, antigen-binding fragment or CAR described in, e.g., PCT publication WO2016/014789. In one embodiment, an antigen binding domain against BCMA is an antigen binding portion, e.g., CDRs, of an antibody described in, e.g., WO2012/163805, WO2001/12812, and WO2003/062401.

[0495] In other embodiment, the CAR molecule comprises a BCMA CAR molecule, or an antigen binding domain against BCMA described herein, e.g., a BCMA CAR described in US-2016-0046724-A1 or WO2016/014565. In embodiments, the BCMA CAR comprises an amino acid, or has a nucleotide sequence of a CAR molecule, or an antigen binding domain according to US-2016-0046724-A1, or Table 1 or 16, SEQ ID NO: 271 or SEQ ID NO: 273 of WO2016/014565, incorporated herein by reference, or a sequence substantially identical to any of the aforesaid sequences (e.g., at least 85%, 90%, 95% or more identical to any of the aforesaid BCMA CAR sequences). The amino acid and nucleotide sequences encoding the BCMA CAR molecules and antigen binding domains (e.g., including one, two, three VH CDRs; and one, two, three VL CDRs according to Kabat or Chothia), are specified in WO2016/014565.

[0496] In one embodiment, an antigen binding domain against GFR ALPHA-4 CAR antigen is an antigen binding portion, e.g., CDRs, of an antibody described in, e.g., WO2016/025880, incorporated herein by reference. In one embodiment, the CAR molecule comprises an a GFR ALPHA-4 CAR, e.g., a CAR molecule, or an antigen binding domain according to Table 2 of WO2016/025880, incorporated herein by reference, or a sequence substantially identical to any of the aforesaid sequences (e.g., at least 85%, 90%, 95% or more identical to any of the aforesaid GFR ALPHA-4 sequences). The amino acid and nucleotide sequences encoding the GFR ALPHA-4 CAR molecules and antigen binding domains (e.g., including one, two, three VH CDRs; and one, two, three VL CDRs according to Kabat or Chothia), are specified in WO2016/025880.

[0497] In one embodiment, an antigen binding domain against Tn antigen is an antigen binding portion, e.g., CDRs, of an antibody described in, e.g., U.S. Pat. No. 8,440,798; Brooks et al., PNAS 107(22):10056-10061 (2010), and Stone et al., OncoImmunology 1(61:863-873(2012).

[0498] In one embodiment, an antigen binding domain against PSMA is an antigen binding portion, e.g., CDRs, of an antibody described in, e.g., Parker et al., Protein Expr Purif 89(2):136-145 (2013), US 20110268656 (J591 ScFv); Frigerio et al, European J Cancer 49(9):2223-2232 (2013) (scFvD2B); WO 2006125481 (mAbs 3/A12, 3/E7 and 3/F11) and single chain antibody fragments (scFv A5 and D7).

[0499] In one embodiment, an antigen binding domain against ROR1 is an antigen binding portion, e.g., CDRs, of an antibody described in, e.g., Hudecek et al., Clin Cancer Res 19(12):3153-3164 (2013); WO 2011159847; and US20130101607.

[0500] In one embodiment, an antigen binding domain against FLT3 is an antigen binding portion, e.g., CDRs, of an antibody described in, e.g., WO2011076922, U.S. Pat. No. 5,777,084, EP0754230, US20090297529, and several commercial catalog antibodies (R&D, ebiosciences, Abcam).

[0501] In one embodiment, an antigen binding domain against TAG72 is an antigen binding portion, e.g., CDRs, of an antibody described in, e.g., Hombach et al., Gastroenterology 113(4):1163-1170 (1997); and Abcam ab691.

[0502] In one embodiment, an antigen binding domain against FAP is an antigen binding portion, e.g., CDRs, of an antibody described in, e.g., Ostermann et al., Clinical Cancer Research 14:4584-4592 (2008) (FAP5), US Pat. Publication No. 2009/0304718; sibrotuzumab (see e.g., Hofheinz et al., Oncology Research and Treatment 26(1), 2003); and Tran et al., J Exp Med 210(6):1125-1135 (2013).

[0503] In one embodiment, an antigen binding domain against CD38 is an antigen binding portion, e.g., CDRs, of daratumumab (see, e.g., Groen et al., Blood 116(21):1261-1262 (2010); MOR202 (see, e.g., U.S. Pat. No. 8,263,746); or antibodies described in U.S. Pat. No. 8,362,211.

[0504] In one embodiment, an antigen binding domain against CD44v6 is an antigen binding portion, e.g., CDRs, of an antibody described in, e.g., Casucci et al., Blood 122(20):3461-3472 (2013).

[0505] In one embodiment, an antigen binding domain against CEA is an antigen binding portion, e.g., CDRs, of an antibody described in, e.g., Chmielewski et al., Gastoenterology 143(4):1095-1107 (2012).

[0506] In one embodiment, an antigen binding domain against EPCAM is an antigen binding portion, e.g., CDRS, of an antibody selected from MT110, EpCAM-CD3 bispecific Ab (see, e.g., clinicaltrials.gov/ct2/show/NCT00635596); Edrecolomab; 3622W94; ING-1; and adecatumumab (MT201).

[0507] In one embodiment, an antigen binding domain against PRSS21 is an antigen binding portion, e.g., CDRs, of an antibody described in U.S. Pat. No. 8,080,650.

[0508] In one embodiment, an antigen binding domain against B7H3 is an antigen binding portion, e.g., CDRs, of an antibody MGA271 (Macrogenics).

[0509] In one embodiment, an antigen binding domain against KIT is an antigen binding portion, e.g., CDRs, of an antibody described in, e.g., U.S. Pat. No. 7,915,391, US20120288506, and several commercial catalog antibodies.

[0510] In one embodiment, an antigen binding domain against IL-13Ra2 is an antigen binding portion, e.g., CDRs, of an antibody described in, e.g., WO2008/146911, WO2004087758, several commercial catalog antibodies, and WO2004087758.

[0511] In one embodiment, an antigen binding domain against CD30 is an antigen binding portion, e.g., CDRs, of an antibody described in, e.g., U.S. Pat. No. 7,090,843 B1, and EP0805871.

[0512] In one embodiment, an antigen binding domain against GD3 is an antigen binding portion, e.g., CDRs, of an antibody described in, e.g., U.S. Pat. Nos. 7,253,263; 8,207,308; US 20120276046; EP1013761; WO2005035577; and U.S. Pat. No. 6,437,098.

[0513] In one embodiment, an antigen binding domain against CD171 is an antigen binding portion, e.g., CDRs, of an antibody described in, e.g., Hong et al., J Immunother 37(2):93-104 (2014).

[0514] In one embodiment, an antigen binding domain against IL-11Ra is an antigen binding portion, e.g., CDRs, of an antibody available from Abcam (cat #ab55262) or Novus Biologicals (cat #EPR5446). In another embodiment, an antigen binding domain again IL-11Ra is a peptide, see, e.g., Huang et al., Cancer Res 72(1):271-281 (2012).

[0515] In one embodiment, an antigen binding domain against PSCA is an antigen binding portion, e.g., CDRs, of an antibody described in, e.g., Morgenroth et al., Prostate 67(10):1121-1131 (2007) (scFv 7F5); Nejatollahi et al., J of Oncology 2013(2013), article ID 839831 (scFv C5-II); and US Pat Publication No. 20090311181.

[0516] In one embodiment, an antigen binding domain against VEGFR2 is an antigen binding portion, e.g., CDRs, of an antibody described in, e.g., Chinnasamy et al., J Clin Invest 120(11):3953-3968 (2010).

[0517] In one embodiment, an antigen binding domain against LewisY is an antigen binding portion, e.g., CDRs, of an antibody described in, e.g., Kelly et al., Cancer Biother Radiopharm 23(4):411-423 (2008) (hu3S193 Ab (scFvs)); Dolezal et al., Protein Engineering 16(1):47-56 (2003) (NC10 scFv).

[0518] In one embodiment, an antigen binding domain against CD24 is an antigen binding portion, e.g., CDRs, of an antibody described in, e.g., Maliar et al., Gastroenterology 143(5):1375-1384 (2012).

[0519] In one embodiment, an antigen binding domain against PDGFR-beta is an antigen binding portion, e.g., CDRs, of an antibody Abcam ab32570.

[0520] In one embodiment, an antigen binding domain against SSEA-4 is an antigen binding portion, e.g., CDRs, of antibody MC813 (Cell Signaling), or other commercially available antibodies.

[0521] In one embodiment, an antigen binding domain against CD20 is an antigen binding portion, e.g., CDRs, of the antibody Rituximab, Ofatumumab, Ocrelizumab, Veltuzumab, or GA101.

[0522] In one embodiment, an antigen binding domain against Folate receptor alpha is an antigen binding portion, e.g., CDRs, of the antibody IMGN853, or an antibody described in US20120009181; U.S. Pat. No. 4,851,332, LK26: U.S. Pat. No. 5,952,484.

[0523] In one embodiment, an antigen binding domain against ERBB2 (Her2/neu) is an antigen binding portion, e.g., CDRs, of the antibody trastuzumab, or pertuzumab.

[0524] In one embodiment, an antigen binding domain against MUC1 is an antigen binding portion, e.g., CDRs, of the antibody SAR566658.

[0525] In one embodiment, the antigen binding domain against EGFR is antigen binding portion, e.g., CDRs, of the antibody cetuximab, panitumumab, zalutumumab, nimotuzumab, or matuzumab.

[0526] In one embodiment, an antigen binding domain against NCAM is an antigen binding portion, e.g., CDRs, of the antibody clone 2-2B: MAB5324 (EMD Millipore).

[0527] In one embodiment, an antigen binding domain against Ephrin B2 is an antigen binding portion, e.g., CDRs, of an antibody described in, e.g., Abengozar et al., Blood 119(19):4565-4576 (2012).

[0528] In one embodiment, an antigen binding domain against IGF-I receptor is an antigen binding portion, e.g., CDRs, of an antibody described in, e.g., U.S. Pat. No. 8,344,112 B2; EP2322550 A1; WO 2006/138315, or PCT/US2006/022995.

[0529] In one embodiment, an antigen binding domain against CAIX is an antigen binding portion, e.g., CDRs, of the antibody clone 303123 (R&D Systems).

[0530] In one embodiment, an antigen binding domain against LMP2 is an antigen binding portion, e.g., CDRs, of an antibody described in, e.g., U.S. Pat. No. 7,410,640, or US20050129701.

[0531] In one embodiment, an antigen binding domain against gp100 is an antigen binding portion, e.g., CDRs, of the antibody HMB45, NKIbetaB, or an antibody described in WO2013165940, or US20130295007

[0532] In one embodiment, an antigen binding domain against tyrosinase is an antigen binding portion, e.g., CDRs, of an antibody described in, e.g., U.S. Pat. No. 5,843,674; or U.S. Ser. No. 19/950,504048.

[0533] In one embodiment, an antigen binding domain against EphA2 is an antigen binding portion, e.g., CDRs, of an antibody described in, e.g., Yu et al., Mol Ther 22(1):102-111 (2014).

[0534] In one embodiment, an antigen binding domain against GD3 is an antigen binding portion, e.g., CDRs, of an antibody described in, e.g., U.S. Pat. Nos. 7,253,263; 8,207,308; US 20120276046; EP1013761 A3; 20120276046; WO2005035577; or U.S. Pat. No. 6,437,098.

[0535] In one embodiment, an antigen binding domain against fucosyl GM1 is an antigen binding portion, e.g., CDRs, of an antibody described in, e.g., US20100297138; or WO2007/067992.

[0536] In one embodiment, an antigen binding domain against sLe is an antigen binding portion, e.g., CDRs, of the antibody G193 (for lewis Y), see Scott A M et al, Cancer Res 60: 3254-61 (2000), also as described in Neeson et al, J Immunol May 2013 190 (Meeting Abstract Supplement) 177.10.

[0537] In one embodiment, an antigen binding domain against GM3 is an antigen binding portion, e.g., CDRs, of the antibody CA 2523449 (mAb 14F7).

[0538] In one embodiment, an antigen binding domain against HMWMAA is an antigen binding portion, e.g., CDRs, of an antibody described in, e.g., Kmiecik et al., Oncoimmunology 3(1):e27185 (2014) (PMID: 24575382) (mAb9.2.27); U.S. Pat. No. 6,528,481; WO2010033866; or US 20140004124.

[0539] In one embodiment, an antigen binding domain against o-acetyl-GD2 is an antigen binding portion, e.g., CDRs, of the antibody 8B6.

[0540] In one embodiment, an antigen binding domain against TEM1/CD248 is an antigen binding portion, e.g., CDRs, of an antibody described in, e.g., Marty et al., Cancer Lett 235(2):298-308 (2006); Zhao et al., J Immunol Methods 363(2):221-232 (2011).

[0541] In one embodiment, an antigen binding domain against CLDN6 is an antigen binding portion, e.g., CDRs, of the antibody IMAB027 (Ganymed Pharmaceuticals), see e.g., clinicaltrial.gov/show/NCT02054351.

[0542] In one embodiment, an antigen binding domain against TSHR is an antigen binding portion, e.g., CDRs, of an antibody described in, e.g., U.S. Pat. Nos. 8,603,466; 8,501,415; or U.S. Pat. No. 8,309,693.

[0543] In one embodiment, an antigen binding domain against GPRC5D is an antigen binding portion, e.g., CDRs, of the antibody FAB6300A (R&D Systems); or LS-A4180 (Lifespan Biosciences).

[0544] In one embodiment, an antigen binding domain against CD97 is an antigen binding portion, e.g., CDRs, of an antibody described in, e.g., U.S. Pat. No. 6,846,911; de Groot et al., J Immunol 183(6):4127-4134 (2009); or an antibody from R&D:MAB3734.

[0545] In one embodiment, an antigen binding domain against ALK is an antigen binding portion, e.g., CDRs, of an antibody described in, e.g., Mino-Kenudson et al., Clin Cancer Res 16(5):1561-1571 (2010).

[0546] In one embodiment, an antigen binding domain against polysialic acid is an antigen binding portion, e.g., CDRs, of an antibody described in, e.g., Nagae et al., J Biol Chem 288(47):33784-33796 (2013).

[0547] In one embodiment, an antigen binding domain against PLAC1 is an antigen binding portion, e.g., CDRs, of an antibody described in, e.g., Ghods et al., Biotechnol Appl Biochem 2013 doi:10.1002/bab.1177.

[0548] In one embodiment, an antigen binding domain against GloboH is an antigen binding portion of the antibody VK9; or an antibody described in, e.g., Kudryashov V et al, Glycoconj J.15(3):243-9 (1998), Lou et al., Proc Natl Acad Sci USA 111(7):2482-2487 (2014); MBr1: Bremer E-G et al. J Biol Chem 259:14773-14777 (1984).

[0549] In one embodiment, an antigen binding domain against NY-BR-1 is an antigen binding portion, e.g., CDRs of an antibody described in, e.g., Jager et al., Appl Immunohistochem Mol Morphol 15(1):77-83 (2007).

[0550] In one embodiment, an antigen binding domain against WT-1 is an antigen binding portion, e.g., CDRs, of an antibody described in, e.g., Dao et al., Sci Transl Med 5(176):176ra33 (2013); or WO2012/135854.

[0551] In one embodiment, an antigen binding domain against MAGE-A1 is an antigen binding portion, e.g., CDRs, of an antibody described in, e.g., Willemsen et al., J Immunol 174(12):7853-7858 (2005) (TCR-like scFv).

[0552] In one embodiment, an antigen binding domain against sperm protein 17 is an antigen binding portion, e.g., CDRs, of an antibody described in, e.g., Song et al., Target Oncol Aug. 14, 2013 (PMID: 23943313); Song et al., Med Oncol 29(4):2923-2931 (2012).

[0553] In one embodiment, an antigen binding domain against Tie 2 is an antigen binding portion, e.g., CDRs, of the antibody AB33 (Cell Signaling Technology).

[0554] In one embodiment, an antigen binding domain against MAD-CT-2 is an antigen binding portion, e.g., CDRs, of an antibody described in, e.g., PMID: 2450952; U.S. Pat. No. 7,635,753.

[0555] In one embodiment, an antigen binding domain against Fos-related antigen 1 is an antigen binding portion, e.g., CDRs, of the antibody 12F9 (Novus Biologicals).

[0556] In one embodiment, an antigen binding domain against MelanA/MART1 is an antigen binding portion, e.g., CDRs, of an antibody described in, EP2514766 A2; or U.S. Pat. No. 7,749,719.

[0557] In one embodiment, an antigen binding domain against sarcoma translocation breakpoints is an antigen binding portion, e.g., CDRs, of an antibody described in, e.g., Luo et al, EMBO Mol. Med. 4(6):453-461 (2012).

[0558] In one embodiment, an antigen binding domain against TRP-2 is an antigen binding portion, e.g., CDRs, of an antibody described in, e.g., Wang et al, J Exp Med. 184(6):2207-16 (1996).

[0559] In one embodiment, an antigen binding domain against CYP1B1 is an antigen binding portion, e.g., CDRs, of an antibody described in, e.g., Maecker et al, Blood 102 (9): 3287-3294 (2003).

[0560] In one embodiment, an antigen binding domain against RAGE-1 is an antigen binding portion, e.g., CDRs, of the antibody MAB5328 (EMD Millipore).

[0561] In one embodiment, an antigen binding domain against human telomerase reverse transcriptase is an antigen binding portion, e.g., CDRs, of the antibody cat no: LS-B95-100 (Lifespan Biosciences)

[0562] In one embodiment, an antigen binding domain against intestinal carboxyl esterase is an antigen binding portion, e.g., CDRs, of the antibody 4F12: cat no: LS-B6190-50 (Lifespan Biosciences).

[0563] In one embodiment, an antigen binding domain against mut hsp70-2 is an antigen binding portion, e.g., CDRs, of the antibody Lifespan Biosciences: monoclonal: cat no: LS-C133261-100 (Lifespan Biosciences).

[0564] In one embodiment, an antigen binding domain against CD79a is an antigen binding portion, e.g., CDRs, of the antibody Anti-CD79a antibody [HM47/A9] (ab3121), available from Abcam; antibody CD79A Antibody #3351 available from Cell Signalling Technology; or antibody HPA017748-Anti-CD79A antibody produced in rabbit, available from Sigma Aldrich.

[0565] In one embodiment, an antigen binding domain against CD79b is an antigen binding portion, e.g., CDRs, of the antibody polatuzumab vedotin, anti-CD79b described in Dornan et al., “Therapeutic potential of an anti-CD79b antibody-drug conjugate, anti-CD79b-vc-MMAE, for the treatment of non-Hodgkin lymphoma” Blood. Sep. 24, 2009; 114(13):2721-9. doi: 10.1182/blood-2009-02-205500. Epub Jul. 24, 2009, or the bispecific antibody Anti-CD79b/CD3 described in “4507 Pre-Clinical Characterization of T Cell-Dependent Bispecific Antibody Anti-CD79b/CD3 As a Potential Therapy for B Cell Malignancies” Abstracts of 56^{th} ASH Annual Meeting and Exposition, San Francisco, Calif. Dec. 6-9 2014.

[0566] In one embodiment, an antigen binding domain against CD72 is an antigen binding portion, e.g., CDRs, of the antibody J3-109 described in Myers, and Uckun, “An anti-CD72 immunotoxin against therapy-refractory B-lineage acute lymphoblastic leukemia.” Leuk Lymphoma. 1995 June; 18(1-2):119-22, or anti-CD72 (10D6.8.1, mIgG1) described in Poison et al., “Antibody-Drug Conjugates for the Treatment of Non-Hodgkin's Lymphoma: Target and Linker-Drug Selection” Cancer Res Mar. 15, 2009 69; 2358.

[0567] In one embodiment, an antigen binding domain against LAIR1 is an antigen binding portion, e.g., CDRs, of the antibody ANT-301 LAIR1 antibody, available from ProSpec; or anti-human CD305 (LAIR1) Antibody, available from BioLegend.

[0568] In one embodiment, an antigen binding domain against FCAR is an antigen binding portion, e.g., CDRs, of the antibody CD89/FCARAntibody (Catalog #10414-H08H), available from Sino Biological Inc.

[0569] In one embodiment, an antigen binding domain against LILRA2 is an antigen binding portion, e.g., CDRs, of the antibody LILRA2 monoclonal antibody (M17), clone 3C7, available from Abnova, or Mouse Anti-LILRA2 antibody, Monoclonal (2D7), available from Lifespan Biosciences.

[0570] In one embodiment, an antigen binding domain against CD300LF is an antigen binding portion, e.g., CDRs, of the antibody Mouse Anti-CMRF35-like molecule 1 antibody, Monoclonal[UP-D2], available from BioLegend, or Rat Anti-CMRF35-like molecule 1 antibody, Monoclonal[234903], available from R&D Systems.

[0571] In one embodiment, an antigen binding domain against CLEC12A is an antigen binding portion, e.g., CDRs, of the antibody Bispecific T cell Engager (BiTE) scFv-antibody and ADC described in Noordhuis et al., “Targeting of CLEC12A In Acute Myeloid Leukemia by Antibody-Drug-Conjugates and Bispecific CLL-1xCD3 BiTE Antibody” 53^{rd} ASH Annual Meeting and Exposition, Dec. 10-13, 2011, and MCLA-117 (Merus).

[0572] In one embodiment, an antigen binding domain against BST2 (also called CD317) is an antigen binding portion, e.g., CDRs, of the antibody Mouse Anti-CD317 antibody, Monoclonal[3H4], available from Antibodies-Online or Mouse Anti-CD317 antibody, Monoclonal[696739], available from R&D Systems.

[0573] In one embodiment, an antigen binding domain against EMR2 (also called CD312) is an antigen binding portion, e.g., CDRs, of the antibody Mouse Anti-CD312 antibody, Monoclonal[LS-B8033] available from Lifespan Biosciences, or Mouse Anti-CD312 antibody, Monoclonal[494025] available from R&D Systems.

[0574] In one embodiment, an antigen binding domain against LY75 is an antigen binding portion, e.g., CDRs, of the antibody Mouse Anti-Lymphocyte antigen 75 antibody, Monoclonal[HD30] available from EMD Millipore or Mouse Anti-Lymphocyte antigen 75 antibody, Monoclonal[A15797] available from Life Technologies.

[0575] In one embodiment, an antigen binding domain against GPC3 is an antigen binding portion, e.g., CDRs, of the antibody hGC33 described in Nakano K, Ishiguro T, Konishi H, et al. Generation of a humanized anti-glypican 3 antibody by CDR grafting and stability optimization. Anticancer Drugs. 2010 November; 21(10):907-916, or MDX-1414, HN3, or YP7, all three of which are described in Feng et al., “Glypican-3 antibodies: a new therapeutic target for liver cancer.” FEBS Lett. Jan. 21, 2014; 588(2):377-82.

[0576] In one embodiment, an antigen binding domain against FCRL5 is an antigen binding portion, e.g., CDRs, of the anti-FcRL5 antibody described in Elkins et al., “FcRL5 as a target of antibody-drug conjugates for the treatment of multiple myeloma” Mol Cancer Ther. 2012 October; 11(10):2222-32.

[0577] In one embodiment, an antigen binding domain against IGLL1 is an antigen binding portion, e.g., CDRs, of the antibody Mouse Anti-Immunoglobulin lambda-like polypeptide 1 antibody, Monoclonal[AT1G4] available from Lifespan Biosciences, Mouse Anti-Immunoglobulin lambda-like polypeptide 1 antibody, Monoclonal[HSL11] available from BioLegend.

[0578] In one embodiment, the antigen binding domain comprises one, two three (e.g., all three) heavy chain CDRs, HC CDR1, HC CDR2 and HC CDR3, from an antibody listed above, and/or one, two, three (e.g., all three) light chain CDRs, LC CDR1, LC CDR2 and LC CDR3, from an antibody listed above. In one embodiment, the antigen binding domain comprises a heavy chain variable region and/or a variable light chain region of an antibody listed above.

[0579] In another aspect, the antigen binding domain comprises a humanized antibody or an antibody fragment. In some aspects, a non-human antibody is humanized, where specific sequences or regions of the antibody are modified to increase similarity to an antibody naturally produced in a human or fragment thereof. In one aspect, the antigen binding domain is humanized.

### Bispecific CARS

[0580] In an embodiment a multispecific antibody molecule is a bispecific antibody molecule. A bispecific antibody has specificity for no more than two antigens. A bispecific antibody molecule is characterized by a first immunoglobulin variable domain sequence which has binding specificity for a first epitope and a second immunoglobulin variable domain sequence that has binding specificity for a second epitope. In an embodiment the first and second epitopes are on the same antigen, e.g., the same protein (or subunit of a multimeric protein). In an embodiment the first and second epitopes overlap. In an embodiment the first and second epitopes do not overlap. In an embodiment the first and second epitopes are on different antigens, e.g., different proteins (or different subunits of a multimeric protein). In an embodiment a bispecific antibody molecule comprises a heavy chain variable domain sequence and a light chain variable domain sequence which have binding specificity for a first epitope and a heavy chain variable domain sequence and a light chain variable domain sequence which have binding specificity for a second epitope. In an embodiment a bispecific antibody molecule comprises a half antibody having binding specificity for a first epitope and a half antibody having binding specificity for a second epitope. In an embodiment a bispecific antibody molecule comprises a half antibody, or fragment thereof, having binding specificity for a first epitope and a half antibody, or fragment thereof, having binding specificity for a second epitope. In an embodiment a bispecific antibody molecule comprises a scFv, or fragment thereof, have binding specificity for a first epitope and a scFv, or fragment thereof, have binding specificity for a second epitope.

[0581] In certain embodiments, the antibody molecule is a multi-specific (e.g., a bispecific or a trispecific) antibody molecule. Protocols for generating bispecific or heterodimeric antibody molecules are known in the art; including but not limited to, for example, the “knob in a hole” approach described in, e.g., U.S. Pat. No. 5,731,168; the electrostatic steering Fc pairing as described in, e.g., WO 09/089004, WO 06/106905 and WO 2010/129304; Strand Exchange Engineered Domains (SEED) heterodimer formation as described in, e.g., WO 07/110205; Fab arm exchange as described in, e.g., WO 08/119353, WO 2011/131746, and WO 2013/060867; double antibody conjugate, e.g., by antibody cross-linking to generate a bi-specific structure using a heterobifunctional reagent having an amine-reactive group and a sulfhydryl reactive group as described in, e.g., U.S. Pat. No. 4,433,059; bispecific antibody determinants generated by recombining half antibodies (heavy-light chain pairs or Fabs) from different antibodies through cycle of reduction and oxidation of disulfide bonds between the two heavy chains, as described in, e.g., U.S. Pat. No. 4,444,878; trifunctional antibodies, e.g., three Fab′ fragments cross-linked through sulfhdryl reactive groups, as described in, e.g., U.S. Pat. No. 5,273,743; biosynthetic binding proteins, e.g., pair of scFvs cross-linked through C-terminal tails preferably through disulfide or amine-reactive chemical cross-linking, as described in, e.g., U.S. Pat. No. 5,534,254; bifunctional antibodies, e.g., Fab fragments with different binding specificities dimerized through leucine zippers (e.g., c-fos and c-jun) that have replaced the constant domain, as described in, e.g., U.S. Pat. No. 5,582,996; bispecific and oligospecific mono- and oligovalent receptors, e.g., VH-CH1 regions of two antibodies (two Fab fragments) linked through a polypeptide spacer between the CH1 region of one antibody and the VH region of the other antibody typically with associated light chains, as described in, e.g., U.S. Pat. No. 5,591,828; bispecific DNA-antibody conjugates, e.g., crosslinking of antibodies or Fab fragments through a double stranded piece of DNA, as described in, e.g., U.S. Pat. No. 5,635,602; bispecific fusion proteins, e.g., an expression construct containing two scFvs with a hydrophilic helical peptide linker between them and a full constant region, as described in, e.g., U.S. Pat. No. 5,637,481; multivalent and multispecific binding proteins, e.g., dimer of polypeptides having first domain with binding region of Ig heavy chain variable region, and second domain with binding region of Ig light chain variable region, generally termed diabodies (higher order structures are also encompassed creating for bispecifc, trispecific, or tetraspecific molecules, as described in, e.g., U.S. Pat. No. 5,837,242; minibody constructs with linked VL and VH chains further connected with peptide spacers to an antibody hinge region and CH3 region, which can be dimerized to form bispecific/multivalent molecules, as described in, e.g., U.S. Pat. No. 5,837,821; VH and VL domains linked with a short peptide linker (e.g., 5 or 10 amino acids) or no linker at all in either orientation, which can form dimers to form bispecific diabodies; trimers and tetramers, as described in, e.g., U.S. Pat. No. 5,844,094; String of VH domains (or VL domains in family members) connected by peptide linkages with crosslinkable groups at the C-terminus further associated with VL domains to form a series of FVs (or scFvs), as described in, e.g., U.S. Pat. No. 5,864,019; and single chain binding polypeptides with both a VH and a VL domain linked through a peptide linker are combined into multivalent structures through non-covalent or chemical crosslinking to form, e.g., homobivalent, heterobivalent, trivalent, and tetravalent structures using both scFV or diabody type format, as described in, e.g., U.S. Pat. No. 5,869,620. Additional exemplary multispecific and bispecific molecules and methods of making the same are found, for example, in U.S. Pat. Nos. 5,910,573, 5,932,448, 5,959,083, U.S. Pat. Nos. 5,989,830, 6,005,079, 6,239,259, 6,294,353, 6,333,396, 6,476,198, 6,511,663, U.S. Pat. Nos. 6,670,453, 6,743,896, 6,809,185, 6,833,441, 7,129,330, 7,183,076, 7,521,056, 7,527,787, 7,534,866, 7,612,181, US2002004587A1, US2002076406A1, US2002103345A1, US2003207346A1, US2003211078A1, US2004219643A1, US2004220388A1, US2004242847A1, US2005003403A1, US2005004352A1, US2005069552A1, US2005079170A1, US2005100543A1, US2005136049A1, US2005136051A1, US2005163782A1, US2005266425A1, US2006083747A1, US2006120960A1, US2006204493A1, US2006263367A1, US2007004909A1, US2007087381A1, US2007128150A1, US2007141049A1, US2007154901A1, US2007274985A1, US2008050370A1, US2008069820A1, US2008152645A1, US2008171855A1, US2008241884A1, US2008254512A1, US2008260738A1, US2009130106A1, US2009148905A1, US2009155275A1, US2009162359A1, US2009162360A1, US2009175851A1, US2009175867A1, US2009232811A1, US2009234105A1, US2009263392A1, US2009274649A1, EP346087A2, WO0006605A2, WO02072635A2, WO04081051A1, WO06020258A2, WO2007044887A2, WO2007095338A2, WO2007137760A2, WO2008119353A1, WO2009021754A2, WO2009068630A1, WO9103493A1, WO9323537A1, WO9409131A1, WO9412625A2, WO9509917A1, WO9637621A2, WO9964460A1. The contents of the above-referenced applications are incorporated herein by reference in their entireties.

[0582] Within each antibody or antibody fragment (e.g., scFv) of a bispecific antibody molecule, the VH can be upstream or downstream of the VL. In some embodiments, the upstream antibody or antibody fragment (e.g., scFv) is arranged with its VH (VH₁) upstream of its VL (VL₁) and the downstream antibody or antibody fragment (e.g., scFv) is arranged with its VL (VL₂) upstream of its VH (VH₂), such that the overall bispecific antibody molecule has the arrangement VH₁—VL₁-VL₂-VH₂. In other embodiments, the upstream antibody or antibody fragment (e.g., scFv) is arranged with its VL (VL₁) upstream of its VH (VH1) and the downstream antibody or antibody fragment (e.g., scFv) is arranged with its VH (VH2) upstream of its VL (VL₂), such that the overall bispecific antibody molecule has the arrangement VL₁-VH₁-VH₂-VL₂. Optionally, a linker is disposed between the two antibodies or antibody fragments (e.g., scFvs), e.g., between VL₁ and VL₂ if the construct is arranged as VH₁-VL₁-VL₂-VH₂, or between VH₁ and VH₂ if the construct is arranged as VL₁-VH₁-VH₂-VL₂. The linker may be a linker as described herein, e.g., a (Gly₄-Ser)n linker, wherein n is 1, 2, 3, 4, 5, or 6, preferably 4 (SEQ ID NO: 78). In general, the linker between the two scFvs should be long enough to avoid mispairing between the domains of the two scFvs. Optionally, a linker is disposed between the VL and VH of the first scFv. Optionally, a linker is disposed between the VL and VH of the second scFv. In constructs that have multiple linkers, any two or more of the linkers can be the same or different. Accordingly, in some embodiments, a bispecific CAR comprises VLs, VHs, and optionally one or more linkers in an arrangement as described herein.

### Stability and Mutations

[0583] The stability of an antigen binding domain to a cancer associated antigen as described herein, e.g., scFv molecules (e.g., soluble scFv), can be evaluated in reference to the biophysical properties (e.g., thermal stability) of a conventional control scFv molecule or a full length antibody. In one embodiment, the humanized scFv has a thermal stability that is greater than about 0.1, about 0.25, about 0.5, about 0.75, about 1, about 1.25, about 1.5, about 1.75, about 2, about 2.5, about 3, about 3.5, about 4, about 4.5, about 5, about 5.5, about 6, about 6.5, about 7, about 7.5, about 8, about 8.5, about 9, about 9.5, about 10 degrees, about 11 degrees, about 12 degrees, about 13 degrees, about 14 degrees, or about 15 degrees Celsius than a control binding molecule (e.g. a conventional scFv molecule) in the described assays.

[0584] The improved thermal stability of the antigen binding domain to a cancer associated antigen described herein, e.g., scFv is subsequently conferred to the entire CAR construct, leading to improved therapeutic properties of the CAR construct. The thermal stability of the antigen binding domain of -a cancer associated antigen described herein, e.g., scFv, can be improved by at least about 2° C. or 3° C. as compared to a conventional antibody. In one embodiment, the antigen binding domain of -a cancer associated antigen described herein, e.g., scFv, has a 1° C. improved thermal stability as compared to a conventional antibody. In another embodiment, the antigen binding domain of a cancer associated antigen described herein, e.g., scFv, has a 2° C. improved thermal stability as compared to a conventional antibody. In another embodiment, the scFv has a 4, 5, 6, 7, 8, 9, 10, 11, 12, 13, 14, 15° C. improved thermal stability as compared to a conventional antibody. Comparisons can be made, for example, between the scFv molecules disclosed herein and scFv molecules or Fab fragments of an antibody from which the scFv VH and VL were derived. Thermal stability can be measured using methods known in the art. For example, in one embodiment, Tm can be measured. Methods for measuring Tm and other methods of determining protein stability are described in more detail below.

[0585] Mutations in scFv (arising through humanization or direct mutagenesis of the soluble scFv) can alter the stability of the scFv and improve the overall stability of the scFv and the CAR construct. Stability of the humanized scFv is compared against the murine scFv using measurements such as Tm, temperature denaturation and temperature aggregation.

[0586] The binding capacity of the mutant scFvs can be determined using assays know in the art and described herein.

[0587] In one embodiment, the antigen binding domain of a cancer associated antigen described herein, e.g., scFv, comprises at least one mutation arising from the humanization process such that the mutated scFv confers improved stability to the CAR construct. In another embodiment, the antigen binding domain of -a cancer associated antigen described herein, e.g., scFv, comprises at least 1, 2, 3, 4, 5, 6, 7, 8, 9, 10 mutations arising from the humanization process such that the mutated scFv confers improved stability to the CAR construct.

### Methods of Evaluating Protein Stability

[0588] The stability of an antigen binding domain may be assessed using, e.g., the methods described below. Such methods allow for the determination of multiple thermal unfolding transitions where the least stable domain either unfolds first or limits the overall stability threshold of a multidomain unit that unfolds cooperatively (e.g., a multidomain protein which exhibits a single unfolding transition). The least stable domain can be identified in a number of additional ways. Mutagenesis can be performed to probe which domain limits the overall stability. Additionally, protease resistance of a multidomain protein can be performed under conditions where the least stable domain is known to be intrinsically unfolded via DSC or other spectroscopic methods (Fontana, et al., (1997) Fold. Des., 2: R17-26; Dimasi et al. (2009) J. Mol. Biol. 393: 672-692). Once the least stable domain is identified, the sequence encoding this domain (or a portion thereof) may be employed as a test sequence in the methods.

### Thermal Stability

[0589] The thermal stability of the compositions may be analyzed using a number of non-limiting biophysical or biochemical techniques known in the art. In certain embodiments, thermal stability is evaluated by analytical spectroscopy.

[0590] An exemplary analytical spectroscopy method is Differential Scanning Calorimetry (DSC). DSC employs a calorimeter which is sensitive to the heat absorbances that accompany the unfolding of most proteins or protein domains (see, e.g. Sanchez-Ruiz, et al., Biochemistry, 27: 1648-52, 1988). To determine the thermal stability of a protein, a sample of the protein is inserted into the calorimeter and the temperature is raised until the Fab or scFv unfolds. The temperature at which the protein unfolds is indicative of overall protein stability.

[0591] Another exemplary analytical spectroscopy method is Circular Dichroism (CD) spectroscopy. CD spectrometry measures the optical activity of a composition as a function of increasing temperature. Circular dichroism (CD) spectroscopy measures differences in the absorption of left-handed polarized light versus right-handed polarized light which arise due to structural asymmetry. A disordered or unfolded structure results in a CD spectrum very different from that of an ordered or folded structure. The CD spectrum reflects the sensitivity of the proteins to the denaturing effects of increasing temperature and is therefore indicative of a protein's thermal stability (see van Mierlo and Steemsma, J. Biotechnol., 79(3):281-98, 2000).

[0592] Another exemplary analytical spectroscopy method for measuring thermal stability is Fluorescence Emission Spectroscopy (see van Mierlo and Steemsma, supra). Yet another exemplary analytical spectroscopy method for measuring thermal stability is Nuclear Magnetic Resonance (NMR) spectroscopy (see, e.g. van Mierlo and Steemsma, supra). The thermal stability of a composition can be measured biochemically. An exemplary biochemical method for assessing thermal stability is a thermal challenge assay. In a “thermal challenge assay”, a composition is subjected to a range of elevated temperatures for a set period of time. For example, in one embodiment, test scFv molecules or molecules comprising scFv molecules are subject to a range of increasing temperatures, e.g., for 1-1.5 hours. The activity of the protein is then assayed by a relevant biochemical assay. For example, if the protein is a binding protein (e.g. an scFv or scFv-containing polypeptide) the binding activity of the binding protein may be determined by a functional or quantitative ELISA.

[0593] Such an assay may be done in a high-throughput format and those disclosed in the Examples using E. coli and high throughput screening. A library of antigen binding domains, e.g., that includes an antigen binding domain to -a cancer associated antigen described herein, e.g., scFv variants, may be created using methods known in the art. Antigen binding domain, e.g., to -a cancer associated antigen described herein, e.g., scFv, expression may be induced and the antigen binding domain, e.g., to -a cancer associated antigen described herein, e.g., scFv, may be subjected to thermal challenge. The challenged test samples may be assayed for binding and those antigen binding domains to -a cancer associated antigen described herein, e.g., scFvs, which are stable may be scaled up and further characterized.

[0594] Thermal stability is evaluated by measuring the melting temperature (Tm) of a composition using any of the above techniques (e.g. analytical spectroscopy techniques). The melting temperature is the temperature at the midpoint of a thermal transition curve wherein 50% of molecules of a composition are in a folded state (See e.g., Dimasi et al. (2009) J. Mol Biol. 393: 672-692). In one embodiment, Tm values for an antigen binding domain to -a cancer associated antigen described herein, e.g., scFv, are about 40° C., 41° C., 42° C., 43° C., 44° C., 45° C., 46° C., 47° C., 48° C., 49° C., 50° C., 51° C., 52° C., 53° C., 54° C., 55° C., 56° C., 57° C., 58° C., 59° C., 60° C., 61° C., 62° C., 63° C., 64° C., 65° C., 66° C., 67° C., 68° C., 69° C., 70° C., 71° C., 72° C., 73° C., 74° C., 75° C., 76° C., 77° C., 78° C., 79° C., 80° C., 81° C., 82° C., 83° C., 84° C., 85° C., 86° C., 87° C., 88° C., 89° C., 90° C., 91° C., 92° C., 93° C., 94° C., 95° C., 96° C., 97° C., 98° C., 99° C., 100° C. In one embodiment, Tm values for an IgG is about 40° C., 41° C., 42° C., 43° C., 44° C., 45° C., 46° C., 47° C., 48° C., 49° C., 50° C., 51° C., 52° C., 53° C., 54° C., 55° C., 56° C., 57° C., 58° C., 59° C., 60° C., 61° C., 62° C., 63° C., 64° C., 65° C., 66° C., 67° C., 68° C., 69° C., 70° C., 71° C., 72° C., 73° C., 74° C., 75° C., 76° C., 77° C., 78° C., 79° C., 80° C., 81° C., 82° C., 83° C., 84° C., 85° C., 86° C., 87° C., 88° C., 89° C., 90° C., 91° C., 92° C., 93° C., 94° C., 95° C., 96° C., 97° C., 98° C., 99° C., 100° C. In one embodiment, Tm values for an multivalent antibody is about 40° C., 41° C., 42° C., 43° C., 44° C., 45° C., 46° C., 47° C., 48° C., 49° C., 50° C., 51° C., 52° C., 53° C., 54° C., 55° C., 56° C., 57° C., 58° C., 59° C., 60° C., 61° C., 62° C., 63° C., 64° C., 65° C., 66° C., 67° C., 68° C., 69° C., 70° C., 71° C., 72° C., 73° C., 74° C., 75° C., 76° C., 77° C., 78° C., 79° C., 80° C., 81° C., 82° C., 83° C., 84° C., 85° C., 86° C., 87° C., 88° C., 89° C., 90° C., 91° C., 92° C., 93° C., 94° C., 95° C., 96° C., 97° C., 98° C., 99° C., 100° C.

[0595] Thermal stability is also evaluated by measuring the specific heat or heat capacity (Cp) of a composition using an analytical calorimetric technique (e.g. DSC). The specific heat of a composition is the energy (e.g. in kcal/mol) is required to rise by 1° C., the temperature of 1 mol of water. As large Cp is a hallmark of a denatured or inactive protein composition. The change in heat capacity (ΔCp) of a composition is measured by determining the specific heat of a composition before and after its thermal transition. Thermal stability may also be evaluated by measuring or determining other parameters of thermodynamic stability including Gibbs free energy of unfolding (ΔG), enthalpy of unfolding (ΔH), or entropy of unfolding (ΔS). One or more of the above biochemical assays (e.g. a thermal challenge assay) are used to determine the temperature (i.e. the Tc value) at which 50% of the composition retains its activity (e.g. binding activity).

[0596] In addition, mutations to the antigen binding domain of a cancer associated antigen described herein, e.g., scFv, can be made to alter the thermal stability of the antigen binding domain of a cancer associated antigen described herein, e.g., scFv, as compared with the unmutated antigen binding domain of a cancer associated antigen described herein, e.g., scFv. When the humanized antigen binding domain of a cancer associated antigen described herein, e.g., scFv, is incorporated into a CAR construct, the antigen binding domain of the cancer associated antigen described herein, e.g., humanized scFv, confers thermal stability to the overall CARs of the present invention. In one embodiment, the antigen binding domain to a cancer associated antigen described herein, e.g., scFv, comprises a single mutation that confers thermal stability to the antigen binding domain of the cancer associated antigen described herein, e.g., scFv. In another embodiment, the antigen binding domain to a cancer associated antigen described herein, e.g., scFv, comprises multiple mutations that confer thermal stability to the antigen binding domain to the cancer associated antigen described herein, e.g., scFv. In one embodiment, the multiple mutations in the antigen binding domain to a cancer associated antigen described herein, e.g., scFv, have an additive effect on thermal stability of the antigen binding domain to the cancer associated antigen described herein binding domain, e.g., scFv.

### b) % Aggregation

[0597] The stability of a composition can be determined by measuring its propensity to aggregate. Aggregation can be measured by a number of non-limiting biochemical or biophysical techniques. For example, the aggregation of a composition may be evaluated using chromatography, e.g. Size-Exclusion Chromatography (SEC). SEC separates molecules on the basis of size. A column is filled with semi-solid beads of a polymeric gel that will admit ions and small molecules into their interior but not large ones. When a protein composition is applied to the top of the column, the compact folded proteins (i.e. non-aggregated proteins) are distributed through a larger volume of solvent than is available to the large protein aggregates. Consequently, the large aggregates move more rapidly through the column, and in this way the mixture can be separated or fractionated into its components. Each fraction can be separately quantified (e.g. by light scattering) as it elutes from the gel. Accordingly, the % aggregation of a composition can be determined by comparing the concentration of a fraction with the total concentration of protein applied to the gel. Stable compositions elute from the column as essentially a single fraction and appear as essentially a single peak in the elution profile or chromatogram.

### c) Binding Affinity

[0598] The stability of a composition can be assessed by determining its target binding affinity. A wide variety of methods for determining binding affinity are known in the art. An exemplary method for determining binding affinity employs surface plasmon resonance. Surface plasmon resonance is an optical phenomenon that allows for the analysis of real-time biospecific interactions by detection of alterations in protein concentrations within a biosensor matrix, for example using the BIAcore system (Pharmacia Biosensor AB, Uppsala, Sweden and Piscataway, N.J.). For further descriptions, see Jonsson, U., et al. (1993) Ann. Biol. Clin. 51:19-26; Jonsson, U., i (1991) Biotechniques 11:620-627; Johnsson, B., et al. (1995) J. Mol. Recognit. 8:125-131; and Johnnson, B., et al. (1991) Anal. Biochem. 198:268-277.

[0599] In one aspect, the antigen binding domain of the CAR comprises an amino acid sequence that is homologous to an antigen binding domain amino acid sequence described herein, and the antigen binding domain retains the desired functional properties of the antigen binding domain described herein.

[0600] In one specific aspect, the CAR composition of the invention comprises an antibody fragment. In a further aspect, the antibody fragment comprises an scFv.

[0601] In various aspects, the antigen binding domain of the CAR is engineered by modifying one or more amino acids within one or both variable regions (e.g., VH and/or VL), for example within one or more CDR regions and/or within one or more framework regions. In one specific aspect, the CAR composition of the invention comprises an antibody fragment. In a further aspect, the antibody fragment comprises an scFv.

[0602] It will be understood by one of ordinary skill in the art that the antibody or antibody fragment of the invention may further be modified such that they vary in amino acid sequence (e.g., from wild-type), but not in desired activity. For example, additional nucleotide substitutions leading to amino acid substitutions at “non-essential” amino acid residues may be made to the protein For example, a nonessential amino acid residue in a molecule may be replaced with another amino acid residue from the same side chain family. In another embodiment, a string of amino acids can be replaced with a structurally similar string that differs in order and/or composition of side chain family members, e.g., a conservative substitution, in which an amino acid residue is replaced with an amino acid residue having a similar side chain, may be made.

[0603] Families of amino acid residues having similar side chains have been defined in the art, including basic side chains (e.g., lysine, arginine, histidine), acidic side chains (e.g., aspartic acid, glutamic acid), uncharged polar side chains (e.g., glycine, asparagine, glutamine, serine, threonine, tyrosine, cysteine), nonpolar side chains (e.g., alanine, valine, leucine, isoleucine, proline, phenylalanine, methionine, tryptophan), beta-branched side chains (e.g., threonine, valine, isoleucine) and aromatic side chains (e.g., tyrosine, phenylalanine, tryptophan, histidine).

[0604] Percent identity in the context of two or more nucleic acids or polypeptide sequences, refers to two or more sequences that are the same. Two sequences are “substantially identical” if two sequences have a specified percentage of amino acid residues or nucleotides that are the same (e.g., 60% identity, optionally 70%, 71%. 72%. 73%, 74%, 75%, 76%, 77%, 78%, 79%, 80%, 81%, 82%, 83%, 84%, 85%, 86%, 87%, 88%, 89%, 90%, 91%, 92%, 93%, 94%, 95%, 96%, 97%, 98%, 99% identity over a specified region, or, when not specified, over the entire sequence), when compared and aligned for maximum correspondence over a comparison window, or designated region as measured using one of the following sequence comparison algorithms or by manual alignment and visual inspection. Optionally, the identity exists over a region that is at least about 50 nucleotides (or 10 amino acids) in length, or more preferably over a region that is 100 to 500 or 1000 or more nucleotides (or 20, 50, 200 or more amino acids) in length.

[0605] For sequence comparison, typically one sequence acts as a reference sequence, to which test sequences are compared. When using a sequence comparison algorithm, test and reference sequences are entered into a computer, subsequence coordinates are designated, if necessary, and sequence algorithm program parameters are designated. Default program parameters can be used, or alternative parameters can be designated. The sequence comparison algorithm then calculates the percent sequence identities for the test sequences relative to the reference sequence, based on the program parameters. Methods of alignment of sequences for comparison are well known in the art. Optimal alignment of sequences for comparison can be conducted, e.g., by the local homology algorithm of Smith and Waterman, (1970) Adv. Appl. Math. 2:482c, by the homology alignment algorithm of Needleman and Wunsch, (1970) J. Mol. Biol. 48:443, by the search for similarity method of Pearson and Lipman, (1988) Proc. Nat'l. Acad. Sci. USA 85:2444, by computerized implementations of these algorithms (GAP, BESTFIT, FASTA, and TFASTA in the Wisconsin Genetics Software Package, Genetics Computer Group, 575 Science Dr., Madison, Wis.), or by manual alignment and visual inspection (see, e.g., Brent et al., (2003) Current Protocols in Molecular Biology).

[0606] Two examples of algorithms that are suitable for determining percent sequence identity and sequence similarity are the BLAST and BLAST 2.0 algorithms, which are described in Altschul et al., (1977) Nuc. Acids Res. 25:3389-3402; and Altschul et al., (1990) J. Mol. Biol. 215:403-410, respectively. Software for performing BLAST analyses is publicly available through the National Center for Biotechnology Information.

[0607] The percent identity between two amino acid sequences can also be determined using the algorithm of E. Meyers and W. Miller, (1988) Comput. Appl. Biosci. 4:11-17) which has been incorporated into the ALIGN program (version 2.0), using a PAM120 weight residue table, a gap length penalty of 12 and a gap penalty of 4. In addition, the percent identity between two amino acid sequences can be determined using the Needleman and Wunsch (1970) J. Mol. Biol. 48:444-453) algorithm which has been incorporated into the GAP program in the GCG software package (available at www.gcg.com), using either a Blossom 62 matrix or a PAM250 matrix, and a gap weight of 16, 14, 12, 10, 8, 6, or 4 and a length weight of 1, 2, 3, 4, 5, or 6.

[0608] In one aspect, the present invention contemplates modifications of the starting antibody or fragment (e.g., scFv) amino acid sequence that generate functionally equivalent molecules. For example, the VH or VL of an antigen binding domain to -a cancer associated antigen described herein, e.g., scFv, comprised in the CAR can be modified to retain at least about 70%, 71%. 72%. 73%, 74%, 75%, 76%, 77%, 78%, 79%, 80%, 81%, 82%, 83%, 84%, 85%, 86%, 87%, 88%, 89%, 90%, 91%, 92%, 93%, 94%, 95%, 96%, 97%, 98%, 99% identity of the starting VH or VL framework region of the antigen binding domain to the cancer associated antigen described herein, e.g., scFv. The present invention contemplates modifications of the entire CAR construct, e.g., modifications in one or more amino acid sequences of the various domains of the CAR construct in order to generate functionally equivalent molecules. The CAR construct can be modified to retain at least about 70%, 71%. 72%. 73%, 74%, 75%, 76%, 77%, 78%, 79%, 80%, 81%, 82%, 83%, 84%, 85%, 86%, 87%, 88%, 89%, 90%, 91%, 92%, 93%, 94%, 95%, 96%, 97%, 98%, 99% identity of the starting CAR construct.

### Transmembrane Domain

[0609] With respect to the transmembrane domain, in various embodiments, a CAR can be designed to comprise a transmembrane domain that is attached to the extracellular domain of the CAR. A transmembrane domain can include one or more additional amino acids adjacent to the transmembrane region, e.g., one or more amino acid associated with the extracellular region of the protein from which the transmembrane was derived (e.g., 1, 2, 3, 4, 5, 6, 7, 8, 9, 10 up to 15 amino acids of the extracellular region) and/or one or more additional amino acids associated with the intracellular region of the protein from which the transmembrane protein is derived (e.g., 1, 2, 3, 4, 5, 6, 7, 8, 9, 10 up to 15 amino acids of the intracellular region). In one aspect, the transmembrane domain is one that is associated with one of the other domains of the CAR e.g., in one embodiment, the transmembrane domain may be from the same protein that the signaling domain, costimulatory domain or the hinge domain is derived from. In another aspect, the transmembrane domain is not derived from the same protein that any other domain of the CAR is derived from. In some instances, the transmembrane domain can be selected or modified by amino acid substitution to avoid binding of such domains to the transmembrane domains of the same or different surface membrane proteins, e.g., to minimize interactions with other members of the receptor complex. In one aspect, the transmembrane domain is capable of homodimerization with another CAR on the cell surface of a CAR-expressing cell. In a different aspect, the amino acid sequence of the transmembrane domain may be modified or substituted so as to minimize interactions with the binding domains of the native binding partner present in the same CAR-expressing cell.

[0610] The transmembrane domain may be derived either from a natural or from a recombinant source. Where the source is natural, the domain may be derived from any membrane-bound or transmembrane protein. In one aspect the transmembrane domain is capable of signaling to the intracellular domain(s) whenever the CAR has bound to a target. A transmembrane domain of particular use in this invention may include at least the transmembrane region(s) of e.g., the alpha, beta or zeta chain of the T-cell receptor, CD28, CD27, CD3 epsilon, CD45, CD4, CD5, CD8, CD9, CD16, CD22, CD33, CD37, CD64, CD80, CD86, CD134, CD137, CD154. In some embodiments, a transmembrane domain may include at least the transmembrane region(s) of, e.g., KIRDS2, OX40, CD2, CD27, LFA-1 (CD11a, CD18), ICOS (CD278), 4-1BB (CD137), GITR, CD40, BAFFR, HVEM (LIGHTR), SLAMF7, NKp80 (KLRF1), NKp44, NKp30, NKp46, CD160, CD19, IL2R beta, IL2R gamma, IL7R α, ITGA1, VLA1, CD49a, ITGA4, IA4, CD49D, ITGA6, VLA-6, CD49f, ITGAD, CD11d, ITGAE, CD103, ITGAL, CD11a, LFA-1, ITGAM, CD11b, ITGAX, CD11c, ITGB1, CD29, ITGB2, CD18, LFA-1, ITGB7, TNFR2, DNAM1 (CD226), SLAMF4 (CD244, 2B4), CD84, CD96 (Tactile), CEACAM1, CRTAM, Ly9 (CD229), CD160 (BY55), PSGL1, CD100 (SEMA4D), SLAMF6 (NTB-A, Ly108), SLAM (SLAMF1, CD150, IPO-3), BLAME (SLAMF8), SELPLG (CD162), LTBR, PAG/Cbp, NKG2D, NKG2C.

[0611] In some instances, the transmembrane domain can be attached to the extracellular region of the CAR, e.g., the antigen binding domain of the CAR, via a hinge, e.g., a hinge from a human protein. For example, in one embodiment, the hinge can be a human Ig (immunoglobulin) hinge (e.g., an IgG4 hinge, an IgD hinge), a GS linker (e.g., a GS linker described herein), a KIR2DS2 hinge or a CD8a hinge. In one embodiment, the hinge or spacer comprises (e.g., consists of) the amino acid sequence of SEQ ID NO:403. In one aspect, the transmembrane domain comprises (e.g., consists of) a transmembrane domain of SEQ ID NO: 12.

[0612] In one aspect, the hinge or spacer comprises an IgG4 hinge. For example, in one embodiment, the hinge or spacer comprises a hinge of the amino acid sequence ESKYGPPCPPCPAPEFLGGPSVFLFPPKPKDTLMISRTPEVTCVVVDVSQEDPEVQFN WYVDGVEVHNAKTKPREEQFNSTYRVVSVLTVLHQDWLNGKEYKCKVSNKGLPS SIEKTISKAKGQPREPQVYTLPPSQEEMTKNQVSLTCLVKGFYPSDIAVEWESNGQP ENNYKTTPPVLDSDGSFFLYSRLTVDKSRWQEGNVFSCSVMHEALHNHYTQKSLS LSLGKM (SEQ ID NO:405). In some embodiments, the hinge or spacer comprises a hinge encoded by a nucleotide sequence of

(SEQ ID NO: 406)
GAGAGCAAGTACGGCCCTCCCTGCCCCCCTTGCCCTGCCCCCGAGTTCCT
GGGCGGACCCAGCGTGTTCCTGTTCCCCCCCAAGCCCAAGGACACCCTGA
TGATCAGCCGGACCCCCGAGGTGACCTGTGTGGTGGTGGACGTGTCCCAG
GAGGACCCCGAGGTCCAGTTCAACTGGTACGTGGACGGCGTGGAGGTGCA
CAACGCCAAGACCAAGCCCCGGGAGGAGCAGTTCAATAGCACCTACCGGG
TGGTGTCCGTGCTGACCGTGCTGCACCAGGACTGGCTGAACGGCAAGGAA
TACAAGTGTAAGGTGTCCAACAAGGGCCTGCCCAGCAGCATCGAGAAAAC
CATCAGCAAGGCCAAGGGCCAGCCTCGGGAGCCCCAGGTGTACACCCTGC
CCCCTAGCCAAGAGGAGATGACCAAGAACCAGGTGTCCCTGACCTGCCTG
GTGAAGGGCTTCTACCCCAGCGACATCGCCGTGGAGTGGGAGAGCAACGG
CCAGCCCGAGAACAACTACAAGACCACCCCCCCTGTGCTGGACAGCGACG
GCAGCTTCTTCCTGTACAGCCGGCTGACCGTGGACAAGAGCCGGTGGCAG
GAGGGCAACGTCTTTAGCTGCTCCGTGATGCACGAGGCCCTGCACAACCA
CTACACCCAGAAGAGCCTGAGCCTGTCCCTGGGCAAGATG.

[0613] In one aspect, the hinge or spacer comprises an IgD hinge. For example, in one embodiment, the hinge or spacer comprises a hinge of the amino acid sequence RWPESPKAQASSVPTAQPQAEGSLAKATTAPATTRNTGRGGEEKKKEKEKEEQEE RETKTPECPSHTQPLGVYLLTPAVQDLWLRDKATFTCFVVGSDLKDAHLTWEVAG KVPTGGVEEGLLERHSNGSQSQHSRLTLPRSLWNAGTSVTCTLNHPSLPPQRLMAL REPAAQAPVKLSLNLLASSDPPEAASWLLCEVSGFSPPNILLMWLEDQREVNTSGF APARPPPQPGSTTFWAWSVLRVPAPPSPQPATYTCVVSHEDSRTLLNASRSLEVSYV TDH (SEQ ID NO:407). In some embodiments, the hinge or spacer comprises a hinge encoded by a nucleotide sequence of

(SEQ ID NO: 408)
AGGTGGCCCGAAAGTCCCAAGGCCCAGGCATCTAGTGTTCCTACTGCACA
GCCCCAGGCAGAAGGCAGCCTAGCCAAAGCTACTACTGCACCTGCCACTA
CGCGCAATACTGGCCGTGGCGGGGAGGAGAAGAAAAAGGAGAAAGAGAAA
GAAGAACAGGAAGAGAGGGAGACCAAGACCCCTGAATGTCCATCCCATAC
CCAGCCGCTGGGCGTCTATCTCTTGACTCCCGCAGTACAGGACTTGTGGC
TTAGAGATAAGGCCACCTTTACATGTTTCGTCGTGGGCTCTGACCTGAAG
GATGCCCATTTGACTTGGGAGGTTGCCGGAAAGGTACCCACAGGGGGGGT
TGAGGAAGGGTTGCTGGAGCGCCATTCCAATGGCTCTCAGAGCCAGCACT
CAAGACTCACCCTTCCGAGATCCCTGTGGAACGCCGGGACCTCTGTCACA
TGTACTCTAAATCATCCTAGCCTGCCCCCACAGCGTCTGATGGCCCTTAG
AGAGCCAGCCGCCCAGGCACCAGTTAAGCTTAGCCTGAATCTGCTCGCCA
GTAGTGATCCCCCAGAGGCCGCCAGCTGGCTCTTATGCGAAGTGTCCGGC
TTTAGCCCGCCCAACATCTTGCTCATGTGGCTGGAGGACCAGCGAGAAGT
GAACACCAGCGGCTTCGCTCCAGCCCGGCCCCCACCCCAGCCGGGTTCTA
CCACATTCTGGGCCTGGAGTGTCTTAAGGGTCCCAGCACCACCTAGCCCC
CAGCCAGCCACATACACCTGTGTTGTGTCCCATGAAGATAGCAGGACCCT
GCTAAATGCTTCTAGGAGTCTGGAGGTTTCCTACGTGACTGACCATT.

[0614] In one aspect, the transmembrane domain may be recombinant, in which case it will comprise predominantly hydrophobic residues such as leucine and valine. In one aspect a triplet of phenylalanine, tryptophan and valine can be found at each end of a recombinant transmembrane domain.

[0615] Optionally, a short oligo- or polypeptide linker, between 2 and 10 amino acids in length may form the linkage between the transmembrane domain and the cytoplasmic region of the CAR. A glycine-serine doublet provides a particularly suitable linker. For example, in one aspect, the linker comprises the amino acid sequence of GGGGSGGGGS (SEQ ID NO:10). In some embodiments, the linker is encoded by a nucleotide sequence of

(SEQ ID NO: 11)
GGTGGCGGAGGTTCTGGAGGTGGAGGTTCC.

[0616] In one aspect, the hinge or spacer comprises a KIR2DS2 hinge.

### Cytoplasmic Domain

[0617] The cytoplasmic domain or region of the CAR includes an intracellular signaling domain. An intracellular signaling domain is generally responsible for activation of at least one of the normal effector functions of the immune cell in which the CAR has been introduced. The term “effector function” refers to a specialized function of a cell. Effector function of a T cell, for example, may be cytolytic activity or helper activity including the secretion of cytokines. Thus the term “intracellular signaling domain” refers to the portion of a protein which transduces the effector function signal and directs the cell to perform a specialized function. While usually the entire intracellular signaling domain can be employed, in many cases it is not necessary to use the entire chain. To the extent that a truncated portion of the intracellular signaling domain is used, such truncated portion may be used in place of the intact chain as long as it transduces the effector function signal. The term intracellular signaling domain is thus meant to include any truncated portion of the intracellular signaling domain sufficient to transduce the effector function signal.

[0618] Examples of intracellular signaling domains for use in the CAR of the invention include the cytoplasmic sequences of the T cell receptor (TCR) and co-receptors that act in concert to initiate signal transduction following antigen receptor engagement, as well as any derivative or variant of these sequences and any recombinant sequence that has the same functional capability.

[0619] It is known that signals generated through the TCR alone are insufficient for full activation of the T cell and that a secondary and/or costimulatory signal is also required. Thus, T cell activation can be said to be mediated by two distinct classes of cytoplasmic signaling sequences: those that initiate antigen-dependent primary activation through the TCR (primary intracellular signaling domains) and those that act in an antigen-independent manner to provide a secondary or costimulatory signal (secondary cytoplasmic domain, e.g., a costimulatory domain).

[0620] A primary signaling domain regulates primary activation of the TCR complex either in a stimulatory way, or in an inhibitory way. Primary intracellular signaling domains that act in a stimulatory manner may contain signaling motifs which are known as immunoreceptor tyrosine-based activation motifs or ITAMs.

[0621] Examples of ITAM containing primary intracellular signaling domains that are of particular use in the invention include those of CD3 zeta, common FcR gamma (FCER1G), Fc gamma RIIa, FcR beta (Fc Epsilon Rib), CD3 gamma, CD3 delta, CD3 epsilon, CD79a, CD79b, DAP10, and DAP12. In one embodiment, a CAR of the invention comprises an intracellular signaling domain, e.g., a primary signaling domain of CD3-zeta.

[0622] In one embodiment, a primary signaling domain comprises a modified ITAM domain, e.g., a mutated ITAM domain which has altered “(e.g., increased or decreased)” activity as compared to the native ITAM domain. In one embodiment, a primary signaling domain comprises a modified ITAM-containing primary intracellular signaling domain, e.g., an optimized and/or truncated ITAM-containing primary intracellular signaling domain. In an embodiment, a primary signaling domain comprises one, two, three, four or more ITAM motifs.

[0623] The intracellular signalling domain of the CAR can comprise the CD3-zeta signaling domain by itself or it can be combined with any other desired intracellular signaling domain(s) useful in the context of a CAR of the invention. For example, the intracellular signaling domain of the CAR can comprise a CD3 zeta chain portion and a costimulatory signaling domain. The costimulatory signaling domain refers to a portion of the CAR comprising the intracellular domain of a costimulatory molecule. A costimulatory molecule is a cell surface molecule other than an antigen receptor or its ligands that is required for an efficient response of lymphocytes to an antigen. Examples of such molecules include CD27, CD28, 4-1BB (CD137), OX40, CD30, CD40, PD-1, ICOS, lymphocyte function-associated antigen-1 (LFA-1), CD2, CD7, LIGHT, NKG2C, B7-H3, and a ligand that specifically binds with CD83, and the like. For example, CD27 costimulation has been demonstrated to enhance expansion, effector function, and survival of human CART cells in vitro and augments human T cell persistence and antitumor activity in vivo (Song et al. Blood. 2012; 119(3):696-706). Further examples of such costimulatory molecules include CDS, ICAM-1, GITR, BAFFR, HVEM (LIGHTR), SLAMF7, NKp80 (KLRF1), NKp44, NKp30, NKp46, CD160, CD19, CD4, CD8alpha, CD8beta, IL2R beta, IL2R gamma, IL7R alpha, ITGA4, VLA1, CD49a, ITGA4, IA4, CD49D, ITGA6, VLA-6, CD49f, ITGAD, CD11d, ITGAE, CD103, ITGAL, CD11a, LFA-1, ITGAM, CD11b, ITGAX, CD11c, ITGB1, CD29, ITGB2, CD18, LFA-1, ITGB7, TNFR2, TRANCE/RANKL, DNAM1 (CD226), SLAMF4 (CD244, 2B4), CD84, CD96 (Tactile), NKG2D, CEACAM1, CRTAM, Ly9 (CD229), CD160 (BY55), PSGL1, CD100 (SEMA4D), CD69, SLAMF6 (NTB-A, Ly108), SLAM (SLAMF1, CD150, IPO-3), BLAME (SLAMF8), SELPLG (CD162), LTBR, LAT, GADS, SLP-76, PAG/Cbp, and CD19a.

[0624] The intracellular signaling sequences within the cytoplasmic portion of the CAR of the invention may be linked to each other in a random or specified order. Optionally, a short oligo- or polypeptide linker, for example, between 2 and 10 amino acids (e.g., 2, 3, 4, 5, 6, 7, 8, 9, or 10 amino acids) in length may form the linkage between intracellular signaling sequence. In one embodiment, a glycine-serine doublet can be used as a suitable linker. In one embodiment, a single amino acid, e.g., an alanine, a glycine, can be used as a suitable linker.

[0625] In one aspect, the intracellular signaling domain is designed to comprise two or more, e.g., 2, 3, 4, 5, or more, costimulatory signaling domains. In an embodiment, the two or more, e.g., 2, 3, 4, 5, or more, costimulatory signaling domains, are separated by a linker molecule, e.g., a linker molecule described herein. In one embodiment, the intracellular signaling domain comprises two costimulatory signaling domains. In some embodiments, the linker molecule is a glycine residue. In some embodiments, the linker is an alanine residue.

[0626] In one aspect, the intracellular signaling domain is designed to comprise the signaling domain of CD3-zeta. In one aspect, the intracellular signaling domain is designed to comprise the signaling domain of CD3-zeta, and the signaling domain of 4-1BB. In one aspect, the signaling domain of 4-1BB is a signaling domain of SEQ ID NO: 14. In one aspect, the signaling domain of CD3-zeta is a signaling domain of SEQ ID NO: 18.

[0627] In one aspect, the intracellular signaling domain is designed to comprise the signaling domain of CD3-zeta and the signaling domain of CD27. In one aspect, the signaling domain of CD27 comprises an amino acid sequence of

(SEQ ID NO: 16)
QRRKYRSNKGESPVEPAEPCRYSCPREEEGSTIPIQEDYRKPEPACSP.

[0628] In one aspect, the signalling domain of CD27 is encoded by a nucleic acid sequence of

(SEQ ID NO: 17)
AGGAGTAAGAGGAGCAGGCTCCTGCACAGTGACTACATGAACATGACTCC
CCGCCGCCCCGGGCCCACCCGCAAGCATTACCAGCCCTATGCCCCACCAC
GCGACTTCGCAGCCTATCGCTCC.

[0629] In one aspect, the CAR-expressing cell described herein can further comprise a second CAR, e.g., a second CAR that includes a different antigen binding domain, e.g., to the same target or a different target (e.g., a target other than a cancer associated antigen described herein or a different cancer associated antigen described herein). In one embodiment, the second CAR includes an antigen binding domain to a target expressed the same cancer cell type as the cancer associated antigen. In one embodiment, the CAR-expressing cell comprises a first CAR that targets a first antigen and includes an intracellular signaling domain having a costimulatory signaling domain but not a primary signaling domain, and a second CAR that targets a second, different, antigen and includes an intracellular signaling domain having a primary signaling domain but not a costimulatory signaling domain. While not wishing to be bound by theory, placement of a costimulatory signaling domain, e.g., 4-1BB, CD28, CD27 or OX-40, onto the first CAR, and the primary signaling domain, e.g., CD3 zeta, on the second CAR can limit the CAR activity to cells where both targets are expressed. In one embodiment, the CAR expressing cell comprises a first cancer associated antigen CAR that includes an antigen binding domain that binds a target antigen described herein, a transmembrane domain and a costimulatory domain and a second CAR that targets a different target antigen (e.g., an antigen expressed on that same cancer cell type as the first target antigen) and includes an antigen binding domain, a transmembrane domain and a primary signaling domain. In another embodiment, the CAR expressing cell comprises a first CAR that includes an antigen binding domain that binds a target antigen described herein, a transmembrane domain and a primary signaling domain and a second CAR that targets an antigen other than the first target antigen (e.g., an antigen expressed on the same cancer cell type as the first target antigen) and includes an antigen binding domain to the antigen, a transmembrane domain and a costimulatory signaling domain.

[0630] In one embodiment, the CAR-expressing cell comprises an XCAR described herein and an inhibitory CAR. In one embodiment, the inhibitory CAR comprises an antigen binding domain that binds an antigen found on normal cells but not cancer cells. In one embodiment, the inhibitory CAR comprises the antigen binding domain, a transmembrane domain and an intracellular domain of an inhibitory molecule. For example, the intracellular domain of the inhibitory CAR can be an intracellular domain of PD1, PD-L1, CTLA4, TIM3, CEACAM (e.g., CEACAM-1, CEACAM-3 and/or CEACAM-5), LAG3, VISTA, BTLA, TIGIT, LAIR1, CD160, 2B4 or TGF beta.

[0631] In one embodiment, when the CAR-expressing cell comprises two or more different CARs, the antigen binding domains of the different CARs can be such that the antigen binding domains do not interact with one another. For example, a cell expressing a first and second CAR can have an antigen binding domain of the first CAR, e.g., as a fragment, e.g., an scFv, that does not form an association with the antigen binding domain of the second CAR, e.g., the antigen binding domain of the second CAR is a VHH.

[0632] In some embodiments, the antigen binding domain comprises a single domain antigen binding (SDAB) molecules include molecules whose complementary determining regions are part of a single domain polypeptide. Examples include, but are not limited to, heavy chain variable domains, binding molecules naturally devoid of light chains, single domains derived from conventional 4-chain antibodies, engineered domains and single domain scaffolds other than those derived from antibodies. SDAB molecules may be any of the art, or any future single domain molecules. SDAB molecules may be derived from any species including, but not limited to mouse, human, camel, llama, lamprey, fish, shark, goat, rabbit, and bovine. This term also includes naturally occurring single domain antibody molecules from species other than Camelidae and sharks.

[0633] In one aspect, an SDAB molecule can be derived from a variable region of the immunoglobulin found in fish, such as, for example, that which is derived from the immunoglobulin isotype known as Novel Antigen Receptor (NAR) found in the serum of shark. Methods of producing single domain molecules derived from a variable region of NAR (“IgNARs”) are described in WO 03/014161 and Streltsov (2005) Protein Sci. 14:2901-2909.

[0634] According to another aspect, an SDAB molecule is a naturally occurring single domain antigen binding molecule known as heavy chain devoid of light chains. Such single domain molecules are disclosed in WO 9404678 and Hamers-Casterman, C. et al. (1993) Nature 363:446-448, for example. For clarity reasons, this variable domain derived from a heavy chain molecule naturally devoid of light chain is known herein as a VHH or nanobody to distinguish it from the conventional VH of four chain immunoglobulins. Such a VHH molecule can be derived from Camelidae species, for example in camel, llama, dromedary, alpaca and guanaco. Other species besides Camelidae may produce heavy chain molecules naturally devoid of light chain; such VHHs are within the scope of the invention.

[0635] The SDAB molecules can be recombinant, CDR-grafted, humanized, camelized, de-immunized and/or in vitro generated (e.g., selected by phage display).

[0636] It has also been discovered, that cells having a plurality of chimeric membrane embedded receptors comprising an antigen binding domain that interactions between the antigen binding domain of the receptors can be undesirable, e.g., because it inhibits the ability of one or more of the antigen binding domains to bind its cognate antigen. Accordingly, disclosed herein are cells having a first and a second non-naturally occurring chimeric membrane embedded receptor comprising antigen binding domains that minimize such interactions. Also disclosed herein are nucleic acids encoding a first and a second non-naturally occurring chimeric membrane embedded receptor comprising antigen binding domains that minimize such interactions, as well as methods of making and using such cells and nucleic acids. In an embodiment the antigen binding domain of one of said first said second non-naturally occurring chimeric membrane embedded receptor, comprises an scFv, and the other comprises a single VH domain, e.g., a camelid, shark, or lamprey single VH domain, or a single VH domain derived from a human or mouse sequence.

[0637] In some embodiments, the claimed invention comprises a first and second CAR, wherein the antigen binding domain of one of said first CAR said second CAR does not comprise a variable light domain and a variable heavy domain. In some embodiments, the antigen binding domain of one of said first CAR said second CAR is an scFv, and the other is not an scFv. In some embodiments, the antigen binding domain of one of said first CAR said second CAR comprises a single VH domain, e.g., a camelid, shark, or lamprey single VH domain, or a single VH domain derived from a human or mouse sequence. In some embodiments, the antigen binding domain of one of said first CAR said second CAR comprises a nanobody. In some embodiments, the antigen binding domain of one of said first CAR said second CAR comprises a camelid VHH domain.

[0638] In some embodiments, the antigen binding domain of one of said first CAR said second CAR comprises an scFv, and the other comprises a single VH domain, e.g., a camelid, shark, or lamprey single VH domain, or a single VH domain derived from a human or mouse sequence. In some embodiments, the antigen binding domain of one of said first CAR said second CAR comprises an scFv, and the other comprises a nanobody. In some embodiments, the antigen binding domain of one of said first CAR said second CAR comprises an scFv, and the other comprises a camelid VHH domain.

[0639] In some embodiments, when present on the surface of a cell, binding of the antigen binding domain of said first CAR to its cognate antigen is not substantially reduced by the presence of said second CAR. In some embodiments, binding of the antigen binding domain of said first CAR to its cognate antigen in the presence of said second CAR is 85%, 90%, 95%, 96%, 97%, 98% or 99% of binding of the antigen binding domain of said first CAR to its cognate antigen in the absence of said second CAR.

[0640] In some embodiments, when present on the surface of a cell, the antigen binding domains of said first CAR said second CAR, associate with one another less than if both were scFv antigen binding domains. In some embodiments, the antigen binding domains of said first CAR said second CAR, associate with one another 85%, 90%, 95%, 96%, 97%, 98% or 99% less than if both were scFv antigen binding domains.

[0641] In another aspect, the CAR-expressing cell described herein can further express another agent, e.g., an agent which enhances the activity of a CAR-expressing cell. For example, in one embodiment, the agent can be an agent which inhibits an inhibitory molecule. Inhibitory molecules, e.g., PD1, can, in some embodiments, decrease the ability of a CAR-expressing cell to mount an immune effector response. Examples of inhibitory molecules include PD1, PD-L1, CTLA4, TIM3, CEACAM (e.g., CEACAM-1, CEACAM-3 and/or CEACAM-5), LAG3, VISTA, BTLA, TIGIT, LAIR1, CD160, 2B4 and TGF beta. In one embodiment, the agent which inhibits an inhibitory molecule, e.g., is a molecule described herein, e.g., an agent that comprises a first polypeptide, e.g., an inhibitory molecule, associated with a second polypeptide that provides a positive signal to the cell, e.g., an intracellular signaling domain described herein. In one embodiment, the agent comprises a first polypeptide, e.g., of an inhibitory molecule such as PD1, PD-L1, CTLA4, TIM3, CEACAM (e.g., CEACAM-1, CEACAM-3 and/or CEACAM-5), LAG3, VISTA, BTLA, TIGIT, LAIR1, CD160, 2B4 or TGF beta, or a fragment of any of these (e.g., at least a portion of an extracellular domain of any of these), and a second polypeptide which is an intracellular signaling domain described herein (e.g., comprising a costimulatory domain (e.g., 41BB, CD27 or CD28, e.g., as described herein) and/or a primary signaling domain (e.g., a CD3 zeta signaling domain described herein). In one embodiment, the agent comprises a first polypeptide of PD1 or a fragment thereof (e.g., at least a portion of an extracellular domain of PD1), and a second polypeptide of an intracellular signaling domain described herein (e.g., a CD28 signaling domain described herein and/or a CD3 zeta signaling domain described herein). PD1 is an inhibitory member of the CD28 family of receptors that also includes CD28, CTLA-4, ICOS, and BTLA. PD-1 is expressed on activated B cells, T cells and myeloid cells (Agata et al. 1996 Int. Immunol 8:765-75). Two ligands for PD1, PD-L1 and PD-L2 have been shown to downregulate T cell activation upon binding to PD1 (Freeman et a. 2000 J Exp Med 192:1027-34; Latchman et al. 2001 Nat Immunol 2:261-8; Carter et al. 2002 Eur J Immunol 32:634-43). PD-L1 is abundant in human cancers (Dong et al. 2003 J Mol Med 81:281-7; Blank et al. 2005 Cancer Immunol. Immunother 54:307-314; Konishi et al. 2004 Clin Cancer Res 10:5094) Immune suppression can be reversed by inhibiting the local interaction of PD1 with PD-L1.

[0642] In one embodiment, the agent comprises the extracellular domain (ECD) of an inhibitory molecule, e.g., Programmed Death 1 (PD1), fused to a transmembrane domain and intracellular signaling domains such as 41BB and CD3 zeta (also referred to herein as a PD1 CAR). In one embodiment, the PD1 CAR, when used in combinations with a XCAR described herein, improves the persistence of the T cell. In one embodiment, the CAR is a PD1 CAR comprising the extracellular domain of PD1 indicated as underlined in SEQ ID NO: 26. In one embodiment, the PD1 CAR comprises the amino acid sequence of SEQ ID NO:26.

(SEQ ID NO: 26)
Malpvtalllplalllhaarppgwfldspdrpwnpptfspallvvtegdn
atftcsfsntsesfylnwyrmspsnqtdklaafpedrsqpgqdcrfrvtq
lpngrdfhmsvvrarrndsgtylcgaislapkaqikeslraelrvterra
evptahpspsprpagqfqtlvtttpaprpptpaptiasqplslrpeacrp
aaggavhtrgldfacdiyiwaplagtcgvlllslvitlyclugrkkllyi
fkqpfmrpvqttqeedgcscrfpeeeeggcelrvkfsrsadapaykqgqn
qlynelnlgrreeydvldlurgrdpemggkprrknpqeglynelqkdkma
eayseigmkgerrrgkghdglyqglstatkdtydalhmqalppr.

[0643] In one embodiment, the PD1 CAR comprises the amino acid sequence provided below (SEQ ID NO:39).

(SEQ ID NO: 39)
pgwfldspdrpwnpptfspallvvtegdnatftcsfsntsesfylnwyrm
spsnqtdklaafpedrsqpgqdcrfrvtqlpngrdfhmsvvrarrndsgt
ylcgaislapkaqikeshaelivterraevptahpspsprpagqfqtlvt
ttpaprpptpaptiasqplslrpeacrpaaggavhtrgldfacdiyiwap
lagtegvlllslvidyckrgrkkllyifkqpfmrpvqttqeedgcscrfp
eeeeggcelrvkfsrsadapaykqgqnqlynelnlgrreeydvldlargr
dpemggkprrknpqeglynelqkdkmaeayseigmkgerrrgkghdglyq
glstatkdtydalhmqalppr.

[0644] In one embodiment, the agent comprises a nucleic acid sequence encoding the PD1 CAR, e.g., the PD1 CAR described herein. In one embodiment, the nucleic acid sequence for the PD1 CAR is shown below, with the PD1 ECD underlined below in SEQ ID NO: 27

(SEQ ID NO: 27)
atggccctccctgtcactgccctgcactccccctcgcactcctgctccac
gccgctagaccacccggatggtttctggactctccggatcgcccgtggaa
tcccccaaccactcaccggcactcaggagtgactgagggcgataatgcga
ccacacgtgctcgttctccaacacctccgaatcattcgtgctgaactggt
accgcatgagcccgtcaaaccagaccgacaagctcgccgcgtaccggaag
atcggtcgcaaccgggacaggattgtcggaccgcgtgactcaactgccga
atggcagagacttccacatgagcgtggtccgcgctaggcgaaacgactcc
gggacctacctgtgcggagccatctcgctggcgcctaaggcccaaatcaa
agagagcttgagggccgaactgagagtgaccgagcgcagagctgaggtgc
caactgcacatccatccccatcgcctcggcctgcggggcagatcagaccc
tggtcacgaccactccggcgccgcgcccaccgactccggccccaactatc
gcgagccagcccctgtcgctgaggccggaagcatgccgccctgccgccgg
aggtgctgtgcatacccggggattggacttcgcatgcgacatctacattt
gggctcctctcgccggaacttgtggcgtgctccttctgtccctggtcatc
accctgtactgcaagcggggtcggaaaaagcttctgtacattttcaagca
gcccttcatgaggcccgtgcaaaccacccaggaggaggacggttgctcct
gccggttccccgaagaggaagaaggaggttgcgagctgcgcgtgaagact
cccggagcgccgacgcccccgcctataagcagggccagaaccagctgtac
aacgaactgaacctgggacggcgggaagagtacgatgtgctggacaagcg
gcgcggccgggaccccgaaatgggcgggaagcctagaagaaagaaccctc
aggaaggcctgtataacgagctgcagaaggacaagatggccgaggcctac
tccgaaattgggatgaagggagagcggcggaggggaaaggggcacgacgg
cctgtaccaaggactgtccaccgccaccaaggacacatacgatgccctgc
acatgcaggccatccccctcgc.

[0645] In another aspect, the present invention provides a population of CAR-expressing cells, e.g., CART cells. In some embodiments, the population of CAR-expressing cells comprises a mixture of cells expressing different CARs. For example, in one embodiment, the population of CART cells can include a first cell expressing a CAR having an antigen binding domain to a cancer associated antigen described herein, and a second cell expressing a CAR having a different antigen binding domain, e.g., an antigen binding domain to a different a cancer associated antigen described herein, e.g., an antigen binding domain to a cancer associated antigen described herein that differs from the cancer associated antigen bound by the antigen binding domain of the CAR expressed by the first cell. As another example, the population of CAR-expressing cells can include a first cell expressing a CAR that includes an antigen binding domain to a cancer associated antigen described herein, and a second cell expressing a CAR that includes an antigen binding domain to a target other than a cancer associated antigen as described herein. In one embodiment, the population of CAR-expressing cells includes, e.g., a first cell expressing a CAR that includes a primary intracellular signaling domain, and a second cell expressing a CAR that includes a secondary signaling domain.

[0646] In another aspect, the present invention provides a population of cells wherein at least one cell in the population expresses a CAR having an antigen binding domain to a cancer associated antigen described herein, and a second cell expressing another agent, e.g., an agent which enhances the activity of a CAR-expressing cell. For example, in one embodiment, the agent can be an agent which inhibits an inhibitory molecule. Inhibitory molecules, e.g., PD-1, can, in some embodiments, decrease the ability of a CAR-expressing cell to mount an immune effector response. Examples of inhibitory molecules include PD-1, PD-L1, CTLA4, TIM3, CEACAM (e.g., CEACAM-1, CEACAM-3 and/or CEACAM-5), LAG3, VISTA, BTLA, TIGIT, LAIR1, CD160, 2B4 and TGF beta. In one embodiment, the agent which inhibits an inhibitory molecule, e.g., is a molecule described herein, e.g., an agent that comprises a first polypeptide, e.g., an inhibitory molecule, associated with a second polypeptide that provides a positive signal to the cell, e.g., an intracellular signaling domain described herein. In one embodiment, the agent comprises a first polypeptide, e.g., of an inhibitory molecule such as PD-1, PD-L1, CTLA4, TIM3, CEACAM (e.g., CEACAM-1, CEACAM-3 and/or CEACAM-5), LAG3, VISTA, BTLA, TIGIT, LAIR1, CD160, 2B4 or TGF beta, or a fragment of any of these, and a second polypeptide which is an intracellular signaling domain described herein (e.g., comprising a costimulatory domain (e.g., 41BB, CD27, OX40 or CD28, e.g., as described herein) and/or a primary signaling domain (e.g., a CD3 zeta signaling domain described herein). In one embodiment, the agent comprises a first polypeptide of PD-1 or a fragment thereof, and a second polypeptide of an intracellular signaling domain described herein (e.g., a 4-1BB signaling domain described herein and/or a CD3 zeta signaling domain described herein).

[0647] In one aspect, the present invention provides methods comprising administering a population of CAR-expressing cells, e.g., CART cells, e.g., a mixture of cells expressing different CARs, in combination with another agent, e.g., a kinase inhibitor, such as a kinase inhibitor described herein. In another aspect, the present invention provides methods comprising administering a population of cells wherein at least one cell in the population expresses a CAR having an antigen binding domain of a cancer associated antigen described herein, and a second cell expressing another agent, e.g., an agent which enhances the activity of a CAR-expressing cell, in combination with another agent, e.g., a kinase inhibitor, such as a kinase inhibitor described herein.

### Regulatable Chimeric Antigen Receptors

[0648] In some embodiments, a regulatable CAR (RCAR) where the CAR activity can be controlled is desirable to optimize the safety and efficacy of a CAR therapy. In embodiments, a target CAR is an RCAR. There are many ways CAR activities can be regulated. For example, inducible apoptosis using, e.g., a caspase fused to a dimerization domain (see, e.g., Di et al., N Egnl. J. Med. 2011 Nov. 3; 365(18):1673-1683), can be used as a safety switch in the CAR therapy of the instant invention. In an aspect, a RCAR comprises a set of polypeptides, typically two in the simplest embodiments, in which the components of a standard CAR described herein, e.g., an antigen binding domain and an intracellular signaling domain, are partitioned on separate polypeptides or members. In some embodiments, the set of polypeptides include a dimerization switch that, upon the presence of a dimerization molecule, can couple the polypeptides to one another, e.g., can couple an antigen binding domain to an intracellular signaling domain.

[0649] In an aspect, an RCAR comprises two polypeptides or members: 1) an intracellular signaling member comprising an intracellular signaling domain, e.g., a primary intracellular signaling domain described herein, and a first switch domain; 2) an antigen binding member comprising an antigen binding domain, e.g., that targets a tumor antigen described herein, as described herein and a second switch domain Optionally, the RCAR comprises a transmembrane domain described herein. In an embodiment, a transmembrane domain can be disposed on the intracellular signaling member, on the antigen binding member, or on both. (Unless otherwise indicated, when members or elements of an RCAR are described herein, the order can be as provided, but other orders are included as well. In other words, in an embodiment, the order is as set out in the text, but in other embodiments, the order can be different. E.g., the order of elements on one side of a transmembrane region can be different from the example, e.g., the placement of a switch domain relative to a intracellular signaling domain can be different, e.g., reversed).

[0650] In an embodiment, the first and second switch domains can form an intracellular or an extracellular dimerization switch. In an embodiment, the dimerization switch can be a homodimerization switch, e.g., where the first and second switch domain are the same, or a heterodimerization switch, e.g., where the first and second switch domain are different from one another.

[0651] In embodiments, an RCAR can comprise a “multi switch.” A multi switch can comprise heterodimerization switch domains or homodimerization switch domains. A multi switch comprises a plurality of, e.g., 2, 3, 4, 5, 6, 7, 8, 9, or 10, switch domains, independently, on a first member, e.g., an antigen binding member, and a second member, e.g., an intracellular signaling member. In an embodiment, the first member can comprise a plurality of first switch domains, e.g., FKBP-based switch domains, and the second member can comprise a plurality of second switch domains, e.g., FRB-based switch domains. In an embodiment, the first member can comprise a first and a second switch domain, e.g., a FKBP-based switch domain and a FRB-based switch domain, and the second member can comprise a first and a second switch domain, e.g., a FKBP-based switch domain and a FRB-based switch domain.

[0652] In an embodiment, the intracellular signaling member comprises one or more intracellular signaling domains, e.g., a primary intracellular signaling domain and one or more costimulatory signaling domains.

[0653] In an embodiment, the antigen binding member may comprise one or more intracellular signaling domains, e.g., one or more costimulatory signaling domains. In an embodiment, the antigen binding member comprises a plurality, e.g., 2 or 3 costimulatory signaling domains described herein, e.g., selected from 41BB, CD28, CD27, ICOS, and OX40, and in embodiments, no primary intracellular signaling domain. In an embodiment, the antigen binding member comprises the following costimulatory signaling domains, from the extracellular to intracellular direction: 41BB-CD27; 41BB-CD27; CD27-41BB; 41BB-CD28; CD28-41BB; OX40-CD28; CD28-OX40; CD28-41BB; or 41BB-CD28. In such embodiments, the intracellular binding member comprises a CD3zeta domain. In one such embodiment the RCAR comprises (1) an antigen binding member comprising, an antigen binding domain, a transmembrane domain, and two costimulatory domains and a first switch domain; and (2) an intracellular signaling domain comprising a transmembrane domain or membrane tethering domain and at least one primary intracellular signaling domain, and a second switch domain.

[0654] An embodiment provides RCARs wherein the antigen binding member is not tethered to the surface of the CAR cell. This allows a cell having an intracellular signaling member to be conveniently paired with one or more antigen binding domains, without transforming the cell with a sequence that encodes the antigen binding member. In such embodiments, the RCAR comprises: 1) an intracellular signaling member comprising: a first switch domain, a transmembrane domain, an intracellular signaling domain, e.g., a primary intracellular signaling domain, and a first switch domain; and 2) an antigen binding member comprising: an antigen binding domain, and a second switch domain, wherein the antigen binding member does not comprise a transmembrane domain or membrane tethering domain, and, optionally, does not comprise an intracellular signaling domain. In some embodiments, the RCAR may further comprise 3) a second antigen binding member comprising: a second antigen binding domain, e.g., a second antigen binding domain that binds a different antigen than is bound by the antigen binding domain; and a second switch domain.

[0655] Also provided herein are RCARs wherein the antigen binding member comprises bispecific activation and targeting capacity. In this embodiment, the antigen binding member can comprise a plurality, e.g., 2, 3, 4, or 5 antigen binding domains, e.g., scFvs, wherein each antigen binding domain binds to a target antigen, e.g. different antigens or the same antigen, e.g., the same or different epitopes on the same antigen. In an embodiment, the plurality of antigen binding domains are in tandem, and optionally, a linker or hinge region is disposed between each of the antigen binding domains. Suitable linkers and hinge regions are described herein.

[0656] An embodiment provides RCARs having a configuration that allows switching of proliferation. In this embodiment, the RCAR comprises: 1) an intracellular signaling member comprising: optionally, a transmembrane domain or membrane tethering domain; one or more co-stimulatory signaling domain, e.g., selected from 41BB, CD28, CD27, ICOS, and OX40, and a switch domain; and 2) an antigen binding member comprising: an antigen binding domain, a transmembrane domain, and a primary intracellular signaling domain, e.g., a CD3zeta domain, wherein the antigen binding member does not comprise a switch domain, or does not comprise a switch domain that dimerizes with a switch domain on the intracellular signaling member. In an embodiment, the antigen binding member does not comprise a co-stimulatory signaling domain. In an embodiment, the intracellular signaling member comprises a switch domain from a homodimerization switch. In an embodiment, the intracellular signaling member comprises a first switch domain of a heterodimerization switch and the RCAR comprises a second intracellular signaling member which comprises a second switch domain of the heterodimerization switch. In such embodiments, the second intracellular signaling member comprises the same intracellular signaling domains as the intracellular signaling member. In an embodiment, the dimerization switch is intracellular. In an embodiment, the dimerization switch is extracellular.

[0657] In any of the RCAR configurations described here, the first and second switch domains comprise a FKBP-FRB based switch as described herein.

[0658] Also provided herein are cells comprising an RCAR described herein. Any cell that is engineered to express a RCAR can be used as a RCARX cell. In an embodiment the RCARX cell is a T cell, and is referred to as a RCART cell. In an embodiment the RCARX cell is an NK cell, and is referred to as a RCARN cell.

[0659] Also provided herein are nucleic acids and vectors comprising RCAR encoding sequences. Sequence encoding various elements of an RCAR can be disposed on the same nucleic acid molecule, e.g., the same plasmid or vector, e.g., viral vector, e.g., lentiviral vector. In an embodiment, (i) sequence encoding an antigen binding member and (ii) sequence encoding an intracellular signaling member, can be present on the same nucleic acid, e.g., vector. Production of the corresponding proteins can be achieved, e.g., by the use of separate promoters, or by the use of a bicistronic transcription product (which can result in the production of two proteins by cleavage of a single translation product or by the translation of two separate protein products). In an embodiment, a sequence encoding a cleavable peptide, e.g., a P2A or F2A sequence, is disposed between (i) and (ii). In an embodiment, a sequence encoding an IRES, e.g., an EMCV or EV71 IRES, is disposed between (i) and (ii). In these embodiments, (i) and (ii) are transcribed as a single RNA. In an embodiment, a first promoter is operably linked to (i) and a second promoter is operably linked to (ii), such that (i) and (ii) are transcribed as separate mRNAs.

[0660] Alternatively, the sequence encoding various elements of an RCAR can be disposed on the different nucleic acid molecules, e.g., different plasmids or vectors, e.g., viral vector, e.g., lentiviral vector. E.g., the (i) sequence encoding an antigen binding member can be present on a first nucleic acid, e.g., a first vector, and the (ii) sequence encoding an intracellular signaling member can be present on the second nucleic acid, e.g., the second vector.

### Dimerization Switches

[0661] Dimerization switches can be non-covalent or covalent. In a non-covalent dimerization switch, the dimerization molecule promotes a non-covalent interaction between the switch domains. In a covalent dimerization switch, the dimerization molecule promotes a covalent interaction between the switch domains.

[0662] In an embodiment, the RCAR comprises a FKBP/FRAP, or FKBP/FRB,-based dimerization switch. FKBP12 (FKBP, or FK506 binding protein) is an abundant cytoplasmic protein that serves as the initial intracellular target for the natural product immunosuppressive drug, rapamycin. Rapamycin binds to FKBP and to the large PI3K homolog FRAP (RAFT, mTOR). FRB is a 93 amino acid portion of FRAP, that is sufficient for binding the FKBP-rapamycin complex (Chen, J., Zheng, X. F., Brown, E. J. & Schreiber, S. L. (1995) Identification of an 11-kDa FKBP12-rapamycin-binding domain within the 289-kDa FKBP12-rapamycin-associated protein and characterization of a critical serine residue. Proc Natl Acad Sci USA 92: 4947-51.)

[0663] In embodiments, an FKBP/FRAP, e.g., an FKBP/FRB, based switch can use a dimerization molecule, e.g., rapamycin or a rapamycin analog.

[0664] The amino acid sequence of FKBP is as follows:

(SEQ ID NO: 52)
D V P D Y A S L G G P S S P K K K R K V S R G V Q
V E T I S P G D G R T F P K R G Q T C V V H Y T G
M L E D G K K F D S S R D R N K P F K F M L G K Q
E V I R G W E E G V A Q M S V G Q R A K L T I S P
D Y A Y G A T G H P G I I P P H A T L V F D V E L
L K L E T S Y

[0665] In embodiments, an FKBP switch domain can comprise a fragment of FKBP having the ability to bind with FRB, or a fragment or analog thereof, in the presence of rapamycin or a rapalog, e.g., the underlined portion of SEQ ID NO: 52, which is:

(SEQ ID NO: 53)
V Q V E T I S P G D G R T F P K R G Q T C V V H Y
T G M L E D G K K F D S S R D R N K P F K F M L G
K Q E V I R G W E E G V A Q M S V G Q R A K L T I
S P D Y A Y G A T G H P G I I P P H A T L V F D V
E L L K L E T S

[0666] The amino acid sequence of FRB is as follows:

(SEQ ID NO: 54)
[sequence omitted]

[0667] “FKBP/FRAP, e.g., an FKBP/FRB, based switch” as that term is used herein, refers to a dimerization switch comprising: a first switch domain, which comprises an FKBP fragment or analog thereof having the ability to bind with FRB, or a fragment or analog thereof, in the presence of rapamycin or a rapalog, e.g., RAD001, and has at least 70, 75, 80, 85, 90, 95, 96, 97, 98, or 99% identity with, or differs by no more than 30, 25, 20, 15, 10, 5, 4, 3, 2, or 1 amino acid residues from, the FKBP sequence of SEQ ID NO: 52 or 53; and a second switch domain, which comprises an FRB fragment or analog thereof having the ability to bind with FRB, or a fragment or analog thereof, in the presence of rapamycin or a rapalog, and has at least 70, 75, 80, 85, 90, 95, 96, 97, 98, or 99% identity with, or differs by no more than 30, 25, 20, 15, 10, 5, 4, 3, 2, or 1 amino acid residues from, the FRB sequence of SEQ ID NO: 54. In an embodiment, a RCAR described herein comprises one switch domain comprises amino acid residues disclosed in SEQ ID NO: 52 (or SEQ ID NO: 53), and one switch domain comprises amino acid residues disclosed in SEQ ID NO: 54.

[0668] In embodiments, the FKBP/FRB dimerization switch comprises a modified FRB switch domain that exhibits altered, e.g., enhanced, complex formation between an FRB-based switch domain, e.g., the modified FRB switch domain, a FKBP-based switch domain, and the dimerization molecule, e.g., rapamycin or a rapalogue, e.g., RAD001. In an embodiment, the modified FRB switch domain comprises one or more mutations, e.g., 2, 3, 4, 5, 6, 7, 8, 9, 10 or more, selected from mutations at amino acid position(s) L2031, E2032, 52035, R2036, F2039, G2040, T2098, W2101, D2102, Y2105, and F2108, where the wild-type amino acid is mutated to any other naturally-occurring amino acid. In an embodiment, a mutant FRB comprises a mutation at E2032, where E2032 is mutated to phenylalanine (E2032F), methionine (E2032M), arginine (E2032R), valine (E2032V), tyrosine (E2032Y), isoleucine (E2032I), e.g., SEQ ID NO: 55, or leucine (E2032L), e.g., SEQ ID NO: 56. In an embodiment, a mutant FRB comprises a mutation at T2098, where T2098 is mutated to phenylalanine (T2098F) or leucine (T2098L), e.g., SEQ ID NO: 57. In an embodiment, a mutant FRB comprises a mutation at E2032 and at T2098, where E2032 is mutated to any amino acid, and where T2098 is mutated to any amino acid, e.g., SEQ ID NO: 58. In an embodiment, a mutant FRB comprises an E2032I and a T2098L mutation, e.g., SEQ ID NO: 59. In an embodiment, a mutant FRB comprises an E2032L and a T2098L mutation, e.g., SEQ ID NO: 60.

TABLE 2
Exemplary mutant FRB having increased
affinity for a dimerization molecule.

| | | SEQ |
|---|---|---|
| FRB | | ID |
| mutant | Amino Acid Sequence | NO: |
| E2032I | ILWHEMWHEGLIEASRLYFGERNVKG | 55 |
| mutant | MFEVLEPLHAMMERGPQTLKETSFNQ | |
| | AYGRDLMEAQEWCRKYMKSGNVKDLT | |
| | QAWDLYYHVFRRISKTS | |
| E2032L | ILWHEMWHEGLLEASRLYFGERNVKG | 56 |
| mutant | MFEVLEPLHAMMERGPQTLKETSFNQ | |
| | AYGRDLMEAQEWCRKYMKSGNVKDLT | |
| | QAWDLYYHVFRRISKTS | |
| T2098L | ILWHEMWHEGLEEASRLYFGERNVKG | 57 |
| mutant | MFEVLEPLHAMMERGPQTLKETSFNQ | |
| | AYGRDLMEAQEWCRKYMKSGNVKDLL | |
| | QAWDLYYHVFRRISKTS | |
| E2032, | ILWHEMWHEGLXEASRLYFGERNVKG | 58 |
| T2098 | MFEVLEPLHAMMERGPQTLKETSFNQ | |
| mutant | AYGRDLMEAQEWCRKYMKSGNVKDLX | |
| | QAWDLYYHVFRRISKTS | |
| E20321, | ILWHEMWHEGLIEASRLYFGERNVKG | 59 |
| T2098L | MFEVLEPLHAMMERGPQTLKETSFNQ | |
| mutant | AYGRDLMEAQEWCRKYMKSGNVKDLL | |
| | QAWDLYYHVFRRISKTS | |
| E2032L, | ILWHEMWHEGLLEASRLYFGERNVKG | 60 |
| T2098L | MFEVLEPLHAMMERGPQTLKETSFNQ | |
| mutant | AYGRDLMEAQEWCRKYMKSGNVKDLL | |
| | QAWDLYYHVFRRISKTS | |

[0669] Other suitable dimerization switches include a GyrB-GyrB based dimerization switch, a Gibberellin-based dimerization switch, a tag/binder dimerization switch, and a halo-tag/snap-tag dimerization switch. Following the guidance provided herein, such switches and relevant dimerization molecules will be apparent to one of ordinary skill.

### Dimerization Molecule

[0670] Association between the switch domains is promoted by the dimerization molecule. In the presence of dimerization molecule interaction or association between switch domains allows for signal transduction between a polypeptide associated with, e.g., fused to, a first switch domain, and a polypeptide associated with, e.g., fused to, a second switch domain. In the presence of non-limiting levels of dimerization molecule signal transduction is increased by 1.1, 1.2, 1.3, 1.4, 1.5, 1.6, 1.7, 1.8, 1.9, 2, 5, 10, 50, 100 fold, e.g., as measured in a system described herein.

[0671] Rapamycin and rapamycin analogs (sometimes referred to as rapalogues), e.g., RAD001, can be used as dimerization molecules in a FKBP/FRB-based dimerization switch described herein. In an embodiment the dimerization molecule can be selected from rapamycin (sirolimus), RAD001 (everolimus), zotarolimus, temsirolimus, AP-23573 (ridaforolimus), biolimus and AP21967. Additional rapamycin analogs suitable for use with FKBP/FRB-based dimerization switches are further described in the section entitled “Combination Therapies”, or in the subsection entitled “Exemplary mTOR inhibitors”.

### Split CAR

[0672] In some embodiments, the CAR-expressing cell (e.g., target CAR or anti-target CAR) uses a split CAR. The split CAR approach is described in more detail in publications WO2014/055442 and WO2014/055657. Briefly, a split CAR system comprises a cell expressing a first CAR having a first antigen binding domain and a costimulatory domain (e.g., 41BB), and the cell also expresses a second CAR having a second antigen binding domain and an intracellular signaling domain (e.g., CD3 zeta). When the cell encounters the first antigen, the costimulatory domain is activated, and the cell proliferates. When the cell encounters the second antigen, the intracellular signaling domain is activated and cell-killing activity begins. Thus, the CAR-expressing cell is only fully activated in the presence of both antigens.

### Exemplary CAR Molecules

[0673] The CAR molecules disclosed herein can comprise a binding domain that binds to a target, e.g., a target as described herein; a transmembrane domain, e.g., a transmembrane domain as described herein; and an intracellular signaling domain, e.g., an intracellular domain as described herein. In embodiments, the binding domain comprises a heavy chain complementary determining region 1 (HC CDR1), a heavy chain complementary determining region 2 (HC CDR2), and a heavy chain complementary determining region 3 (HC CDR3) of a heavy chain binding domain described herein, and/or a light chain complementary determining region 1 (LC CDR1), a light chain complementary determining region 2 (LC CDR2), and a light chain complementary determining region 3 (LC CDR3) of a light chain binding domain described herein.

### CD19 CAR

[0674] In other embodiments, the CAR molecule comprises a CD19 CAR molecule described herein, e.g., a CD19 CAR molecule described in US-2015-0283178-A1, e.g., CTL019. In embodiments, the CD19 CAR comprises an amino acid, or has a nucleotide sequence shown in US-2015-0283178-A1, incorporated herein by reference, or a sequence substantially identical thereto (e.g., at least 85%, 90%, 95% or more identical thereto).

[0675] In one embodiment, the CAR T cell that specifically binds to CD19 has the USAN designation TISAGENLECLEUCEL-T. CTL019 is made by a gene modification of T cells is mediated by stable insertion via transduction with a self-inactivating, replication deficient Lentiviral (LV) vector containing the CTL019 transgene under the control of the EF-1 alpha promoter. CTL019 can be a mixture of transgene positive and negative T cells that are delivered to the subject on the basis of percent transgene positive T cells.

[0676] In other embodiments, the CD19 CAR includes a CAR molecule, or an antigen binding domain (e.g., a humanized antigen binding domain) according to Table 3 of WO2014/153270, incorporated herein by reference. The amino acid and nucleotide sequences encoding the CD19 CAR molecules and antigen binding domains (e.g., including one, two, three VH CDRs; and one, two, three VL CDRs according to Kabat or Chothia), are specified in WO2014/153270. In embodiments, the CD19 CAR comprises an amino acid, or has a nucleotide sequence shown in WO2014/153270 incorporated herein by reference, or a sequence substantially identical to any of the aforesaid sequences (e.g., at least 85%, 90%, 95% or more identical to any of the aforesaid CD19 CAR sequences).

[0677] In one embodiment, the parental murine scFv sequence is the CAR19 construct provided in PCT publication WO2012/079000 (incorporated herein by reference) and provided herein in Table 3. In one embodiment, the anti-CD19 binding domain is a scFv described in WO2012/079000 and provided herein in Table 3.

[0678] In one embodiment, the CD19 CAR comprises an amino acid sequence provided as SEQ ID NO: 12 in PCT publication WO2012/079000. In embodiment, the amino acid sequence is:

[0679] MALPVTALLLPLALLLHAARPdigmtgttsslsaslgdrvtiscrasgdiskylnwyqqkpdgtvklli yhtsrlhsgvpsrfsgsgsgtdysltisnlegediatyfcgggntlpytfgggtkleitggggsggggsggggsevklqesgpglva psgslsvtctvsgvslpdygvswirgpprkglewlgviwgsettyynsalksrltiikdnsksgvflkmnslqtddtaiyycakh yyyggsyamdywgggtsvtvsstttpaprpptpaptiasgplslrpeacrpaaggavhtrgldfacdiyiwaplagtcgvlllsly itlyckrgrkkllyifkgpfmrpvgttgeedgcscrfpeeeeggcelrvkfsrsadapaykqgqnqlynelnlgrreeydvldkrr grdpemggkprrknpgeglynelgkdkmaeayseigmkgerrrgkghdglygglstatkdtydalhmqalppr (SEQ ID NO: 891), or a sequence substantially identical thereto (e.g., at least 85%, 90% or 95% or higher identical thereto), with or without the signal peptide sequence indicated in capital letters.

[0680] In embodiment, the amino acid sequence is:

[0681] digmtgttsslsaslgdrvtiscrasgdiskylnwyqqkpdgtvklliyhtsrlhsgvpsrfsgsgsgtdysltisnleqe diatyfcgggntlpytfgggtkleitggggsggggsggggsevklgesgpglvapsqslsvtctvsgvslpdygvswirqpprkg lewlgviwgsettyynsalksrltiikdnsksgvflkmnslgtddtaiyycakhyyyggsyamdywgggtsvtvsstttpaprp ptpaptiasgplslrpeacrpaaggavhtrgldfacdiyiwaplagtcgvlllslvitlyckrgrkkllyifkgpfmrpvgttqeedg cscrfpeeeeggcelrvkfsrsadapaykgggnglynelnlgrreeydvldkrrgrdpemggkprrknpqeglynelqkdkm aeayseigmkgerrrgkghdglyqglstatkdtydalhmqalppr (SEQ ID NO: 892), or a sequence substantially homologous thereto (e.g., at least 85%, 90% or 95% or higher identical thereto).

[0682] In embodiments, the CAR molecule is a CD19 CAR molecule described herein, e.g., a humanized CAR molecule described herein, e.g., a humanized CD19 CAR molecule of Table 3 or having CDRs as set out in Tables 4A and 4B.

[0683] In embodiments, the CAR molecule is a CD19 CAR molecule described herein, e.g., a murine CAR molecule described herein, e.g., a murine CD19 CAR molecule of Table 3 or having CDRs as set out in Tables 4A and 4B.

[0684] In some embodiments, the CAR molecule comprises one, two, and/or three CDRs from the heavy chain variable region and/or one, two, and/or three CDRs from the light chain variable region of the murine or humanized CD19 CAR of Tables 4A and 4B.

[0685] In one embodiment, the antigen binding domain comprises one, two three (e.g., all three) heavy chain CDRs, HC CDR1, HC CDR2 and HC CDR3, from an antibody listed herein, and/or one, two, three (e.g., all three) light chain CDRs, LC CDR1, LC CDR2 and LC CDR3, from an antibody listed herein. In one embodiment, the antigen binding domain comprises a heavy chain variable region and/or a variable light chain region of an antibody listed or described herein.

[0686] Exemplary CD19 CARs include any of the CD19 CARs or anti-CD19 binding domains described herein, e.g., in one or more tables (e.g., Table 3) described herein (e.g., or an anti-CD19 CAR described in Xu et al. Blood 123.24(2014):3750-9; Kochenderfer et al. Blood 122.25(2013):4129-39, Cruz et al. Blood 122.17(2013):2965-73, NCT00586391, NCT01087294, NCT02456350, NCT00840853, NCT02659943, NCT02650999, NCT02640209, NCT01747486, NCT02546739, NCT02656147, NCT02772198, NCT00709033, NCT02081937, NCT00924326, NCT02735083, NCT02794246, NCT02746952, NCT01593696, NCT02134262, NCT01853631, NCT02443831, NCT02277522, NCT02348216, NCT02614066, NCT02030834, NCT02624258, NCT02625480, NCT02030847, NCT02644655, NCT02349698, NCT02813837, NCT02050347, NCT01683279, NCT02529813, NCT02537977, NCT02799550, NCT02672501, NCT02819583, NCT02028455, NCT01840566, NCT01318317, NCT01864889, NCT02706405, NCT01475058, NCT01430390, NCT02146924, NCT02051257, NCT02431988, NCT01815749, NCT02153580, NCT01865617, NCT02208362, NCT02685670, NCT02535364, NCT02631044, NCT02728882, NCT02735291, NCT01860937, NCT02822326, NCT02737085, NCT02465983, NCT02132624, NCT02782351, NCT01493453, NCT02652910, NCT02247609, NCT01029366, NCT01626495, NCT02721407, NCT01044069, NCT00422383, NCT01680991, NCT02794961, or NCT02456207, each of which is incorporated herein by reference in its entirety.

[0687] Exemplary CD19 CAR and antigen binding domain constructs that can be used in the methods described herein are shown in Table 3. The light and heavy chain CDR sequences according to Kabat are shown by the bold and underlined text, and are also summarized in Tables 3 and 4A-4B below. The location of the signal sequence and histidine tag are also underlined. In embodiments, the CD19 CAR sequences and antigen binding fragments thereof do not include the signal sequence and/or histidine tag sequences.

[0688] In embodiments, the CD19 CAR comprises an anti-CD19 binding domain (e.g., murine or humanized anti-CD19 binding domain), a transmembrane domain, and an intracellular signaling domain, and wherein said anti-CD19 binding domain comprises a heavy chain complementary determining region 1 (HC CDR1), a heavy chain complementary determining region 2 (HC CDR2), and a heavy chain complementary determining region 3 (HC CDR3) of any anti-CD19 heavy chain binding domain amino acid sequences listed in Table 3 and 4A-4B, or a sequence at least 85%, 90%, 95% or more identical thereto (e.g., having less than 5, 4, 3, 2 or 1 amino acid substitutions, e.g., conservative substitutions).

[0689] In one embodiment, the anti-CD19 binding domain comprises a light chain variable region described herein (e.g., in Table 3) and/or a heavy chain variable region described herein (e.g., in Table 3), or a sequence at least 85%, 90%, 95% or more identical thereto.

[0690] In one embodiment, the encoded anti-CD19 binding domain is a scFv comprising a light chain and a heavy chain of an amino acid sequence of Tables 3, or a sequence at least 85%, 90%, 95% or more identical thereto.

[0691] In an embodiment, the human or humanized anti-CD19 binding domain (e.g., an scFv) comprises: a light chain variable region comprising an amino acid sequence having at least one, two or three modifications (e.g., substitutions, e.g., conservative substitutions) but not more than 30, 20 or 10 modifications (e.g., substitutions, e.g., conservative substitutions) of an amino acid sequence of a light chain variable region provided in Table 3, or a sequence at least 85%, 90%, 95% or more identical thereto; and/or a heavy chain variable region comprising an amino acid sequence having at least one, two or three modifications (e.g., substitutions, e.g., conservative substitutions) but not more than 30, 20 or 10 modifications (e.g., substitutions, e.g., conservative substitutions) of an amino acid sequence of a heavy chain variable region provided in Table 3, or a sequence at least 85%, 90%, 95% or more identical thereto.

TABLE 3
CD19 CAR Constructs

| | | |
|---|---|---|
| | SEQ ID | |
| Name | NO: | Sequence |

CAR 1

| | | |
|---|---|---|
| CAR 1 scFv | 893 | EIVMTQSPATLSLSPGERATLSCRASQDISKYLNWYQQKPGQAPRLLIYHTSRLH |
| domain | | SGIPARFSGSGSGTDYTLTISSLQPEDFAVYFCQQGNTLPYTFGQGTKLEIKGGG |
| | | GSGGGGSGGGGSQVQLQESGPGLVKPSETLSLTCTVSGVSLPDYGVSWIRQPPGK |
| | | GLEWIGVIWGSETTYYSSSLKSRVTISKDNSKNQVSLKLSSVTAADTAVYYCAKH |
| | | YYYGGSYAMDYWGQGTLVTVSS |
| 103101 | 894 | atggccctccctgtcaccgccctgctgcttccgctggctcttctgctccacgccg |
| CAR 1 | | ctcggcccgaaattgtgatgacccagtcacccgccactcttagcctttcacccgg |
| Soluble | | tgagcgcgcaaccctgtcttgcagagcctcccaagacatctcaaaataccttaat |
| scFv - nt | | tggtatcaacagaagcccggacaggctcctcgccttctgatctaccacaccagcc |
| | | ggctccattctggaatccctgccaggttcagcggtagcggatctgggaccgacta |
| | | caccctcactatcagctcactgcagccagaggacttcgctgtctatttctgtcag |
| | | caagggaacaccctgccctacacctttggacagggcaccaagctcgagattaaag |
| | | gtggaggtggcagcggaggaggtgggtccggcggtggaggaagccaggtccaact |
| | | ccaagaaagcggaccgggtcttgtgaagccatcagaaactctttcactgacttgt |
| | | actgtgagcggagtgtctctccccgattacggggtgtcttggatcagacagccac |
| | | cggggaagggtctggaatggattggagtgatttggggctctgagactacttacta |
| | | ctcttcatccctcaagtcacgcgtcaccatctcaaaggacaactctaagaatcag |
| | | gtgtcactgaaactgtcatctgtgaccgcagccgacaccgccgtgtactattgcg |
| | | ctaagcattactattatggcgggagctacgcaatggattactggggacagggtac |
| | | tctggtcaccgtgtccagccaccaccatcatcaccatcaccat |
| 103101 | 895 | MALPVTALLLPLALLLHAARPeivmtqspatlslspgeratlscrasgdiskyln |
| CAR 1 | | wyggkpggaprlliyhtsrlhsgiparfsgsgsgtdytltisslgpedfavyfcq |
| Soluble | | qgntlpytfgqgtkleikggggsggggsggggsqvqlqesgpglvkpsetlsltc |
| scFv - aa | | tvsgyslpdygvswirqppgkglewigviwgsettyyssslksrvtiskdnsknq |
| | | vslklssvtaadtavyycakhyyyggsyamdywgqgtlvtvsshhhhhhhh |
| 104875 | 896 | atggccctccctgtcaccgccctgctgcttccgctggctcttctgctccacgccg |
| CAR 1 - | | ctcggcccgaaattgtgatgacccagtcacccgccactcttagcctttcacccgg |
| Full - nt | | tgagcgcgcaaccctgtcttgcagagcctcccaagacatctcaaaataccttaat |
| | | tggtatcaacagaagcccggacaggctcctcgccttctgatctaccacaccagcc |
| | | ggctccattctggaatccctgccaggttcagcggtagcggatctgggaccgacta |
| | | caccctcactatcagctcactgcagccagaggacttcgctgtctatttctgtcag |
| | | caagggaacaccctgccctacacctttggacagggcaccaagctcgagattaaag |
| | | gtggaggtggcagcggaggaggtgggtccggcggtggaggaagccaggtccaact |
| | | ccaagaaagcggaccgggtcttgtgaagccatcagaaactctttcactgacttgt |
| | | actgtgagcggagtgtctctccccgattacggggtgtcttggatcagacagccac |
| | | cggggaagggtctggaatggattggagtgatttggggctctgagactacttacta |
| | | ctcttcatccctcaagtcacgcgtcaccatctcaaaggacaactctaagaatcag |
| | | gtgtcactgaaactgtcatctgtgaccgcagccgacaccgccgtgtactattgcg |
| | | ctaagcattactattatggcgggagctacgcaatggattactggggacagggtac |
| | | tctggtcaccgtgtccagcaccactaccccagcaccgaggccacccaccccggct |
| | | cctaccatcgcctcccagcctctgtccctgcgtccggaggcatgtagacccgcag |
| | | ctggtggggccgtgcatacccggggtcttgacttcgcctgcgatatctacatttg |
| | | ggcccctctggctggtacttgcggggtcctgctgctttcactcgtgatcactctt |
| | | tactgtaagcgcggtcggaagaagctgctgtacatctttaagcaacccttcatga |
| | | ggcctgtgcagactactcaagaggaggacggctgttcatgccggttcccagagga |
| | | ggaggaaggcggctgcgaactgcgcgtgaaattcagccgcagcgcagatgctcca |
| | | gcctacaagcaggggcagaaccagctctacaacgaactcaatcttggtcggagag |
| | | aggagtacgacgtgctggacaagcggagaggacgggacccagaaatgggcgggaa |
| | | gccgcgcagaaagaatccccaagagggcctgtacaacgagctccaaaaggataag |
| | | atggcagaagcctatagcgagattggtatgaaaggggaacgcagaagaggcaaag |
| | | gccacgacggactgtaccagggactcagcaccgccaccaaggacacctatgacgc |
| | | tcttcacatgcaggccctgccgcctcgg |
| 104875 | 897 | MALPVTALLLPLALLLHAARPeivmtqspatlslspgeratlscrasqdiskyln |
| CAR 1 - | | wyqqkpgqaprlliyhtsrlhsgiparfsgsgsgtdytltisslqpedfavyfcq |
| Full - aa | | qgntlpytfgqgtkleikggggsggggsggggsqvqlqesgpglvkpsetlsltc |
| | | tvsgvslpdygvswirqppgkglewigviwgsettyyssslksrvtiskdnsknq |
| | | vslklssvtaadtavyycakhyyyggsyamdywgqgtlvtvsstttpaprpptpa |
| | | ptiasgplslrpeacrpaaggavhtrgldfacdiyiwaplagtcgvlllslvitl |
| | | yckrgrkkllyifkgpfmrpvgttqeedgcscrfpeeeeggcelrvkfsrsadap |
| | | aykgggnglynelnlgrreeydvldkrrgrdpemggkprrknpqeglynelqkdk |
| | | maeayseigmkgerrrgkghdglygglstatkdtydalhmqalppr |

CAR 2

| | | |
|---|---|---|
| CAR 2 scFv | 898 | eivmtqspatlslspgeratlscrasqdiskylnwyqqkpgqaprlliyhtsrlh |
| domain | | sgiparfsgsgsgtdytltisslgpedfavyfcqqgntlpytfgqgtkleikggg |
| | | gsggggsggggsqvqlqesgpglvkpsetlsltctvsgvslpdygyswirgppgk |
| | | giewigviwgsettyygsslksrvtiskdnsknqvslklssvtaadtavyycakh |
| | | yyyggsyamdywgggtlvtvss |
| 103102 | 899 | atggccctccctgtcaccgccctgctgcttccgctggctcttctgctccacgccg |
| CAR 2 - | | ctcggcccgaaattgtgatgacccagtcacccgccactcttagcctttcacccgg |
| Soluble | | tgagcgcgcaaccctgtcttgcagagcctcccaagacatctcaaaataccttaat |
| scFv - nt | | tggtatcaacagaagcccggacaggctcctcgccttctgatctaccacaccagcc |
| | | ggctccattctggaatccctgccaggttcagcggtagcggatctgggaccgacta |
| | | caccctcactatcagctcactgcagccagaggacttcgctgtctatttctgtcag |
| | | caagggaacaccctgccctacacctttggacagggcaccaagctcgagattaaag |
| | | gtggaggtggcagcggaggaggtgggtccggcggtggaggaagccaggtccaact |
| | | ccaagaaagcggaccgggtcttgtgaagccatcagaaactctttcactgacttgt |
| | | actgtgagcggagtgtctctccccgattacggggtgtcttggatcagacagccac |
| | | cggggaagggtctggaatggattggagtgatttggggctctgagactacttacta |
| | | ccaatcatccctcaagtcacgcgtcaccatctcaaaggacaactctaagaatcag |
| | | gtgtcactgaaactgtcatctgtgaccgcagccgacaccgccgtgtactattgcg |
| | | ctaagcattactattatggcgggagctacgcaatggattactggggacagggtac |
| | | tctggtcaccgtgtccagccaccaccatcatcaccatcaccat |
| 103102 | 900 | MALPVTALLLPLALLLHAARPeivmtqspatlslspgeratlscrasqdiskyln |
| CAR 2 - | | wyggkpggaprlliyhtsrlhsgiparfsgsgsgtdytltisslgpedfavyfcq |
| Soluble | | ggntlpytfgqgtkleikggggsggggsggggsqvqlqesgpglvkpsetlsltc |
| scFv - aa | | tvsgvslpdygvswirqppgkglewigviwgsettyygsslksrvtiskdnsknq |
| | | vslklssvtaadtavyycakhyyyggsyamdywgqgtlvtvsshhhhhhhh |
| 104876 | 901 | atggccctccctgtcaccgccctgctgcttccgctggctcttctgctccacgccg |
| CAR 2 - | | ctcggcccgaaattgtgatgacccagtcacccgccactcttagcctttcacccgg |
| Full - nt | | tgagcgcgcaaccctgtcttgcagagcctcccaagacatctcaaaataccttaat |
| | | tggtatcaacagaagcccggacaggctcctcgccttctgatctaccacaccagcc |
| | | ggctccattctggaatccctgccaggttcagcggtagcggatctgggaccgacta |
| | | caccctcactatcagctcactgcagccagaggacttcgctgtctatttctgtcag |
| | | caagggaacaccctgccctacacctttggacagggcaccaagctcgagattaaag |
| | | gtggaggtggcagcggaggaggtgggtccggcggtggaggaagccaggtccaact |
| | | ccaagaaagcggaccgggtcttgtgaagccatcagaaactctttcactgacttgt |
| | | actgtgagcggagtgtctctccccgattacggggtgtcttggatcagacagccac |
| | | cggggaagggtctggaatggattggagtgatttggggctctgagactacttacta |
| | | ccaatcatccctcaagtcacgcgtcaccatctcaaaggacaactctaagaatcag |
| | | gtgtcactgaaactgtcatctgtgaccgcagccgacaccgccgtgtactattgcg |
| | | ctaagcattactattatggcgggagctacgcaatggattactggggacagggtac |
| | | tctggtcaccgtgtccagcaccactaccccagcaccgaggccacccaccccggct |
| | | cctaccatcgcctcccagcctctgtccctgcgtccggaggcatgtagacccgcag |
| | | ctggtggggccgtgcatacccggggtcttgacttcgcctgcgatatctacatttg |
| | | ggcccctctggctggtacttgcggggtcctgctgctttcactcgtgatcactctt |
| | | tactgtaagcgcggtcggaagaagctgctgtacatctttaagcaacccttcatga |
| | | ggcctgtgcagactactcaagaggaggacggctgttcatgccggttcccagagga |
| | | ggaggaaggcggctgcgaactgcgcgtgaaattcagccgcagcgcagatgctcca |
| | | gcctacaagcaggggcagaaccagctctacaacgaactcaatcttggtcggagag |
| | | aggagtacgacgtgctggacaagcggagaggacgggacccagaaatgggcgggaa |
| | | gccgcgcagaaagaatccccaagagggcctgtacaacgagctccaaaaggataag |
| | | atggcagaagcctatagcgagattggtatgaaaggggaacgcagaagaggcaaag |
| | | gccacgacggactgtaccagggactcagcaccgccaccaaggacacctatgacgc |
| | | tcttcacatgcaggccctgccgcctcgg |
| 104876 | 902 | MALPVTALLLPLALLLHAARPeivmtqspatlslspgeratlscrasqdiskyln |
| CAR 2 - | | wyqqkpgqaprlliyhtsrlhsgiparfsgsgsgtdytltisslqpedfavyfcq |
| Full - aa | | qgntlpytfgqgtkleikggggsggggsggggsqvqlqesgpglvkpsetlsltc |
| | | tvsgvslpdygvswirqppgkglewigviwgsettyyqsslksrvtiskdnsknq |
| | | vslklssvtaadtavyycakhyyyggsyamdywgqgtlvtvsstttpaprpptpa |
| | | ptiasqplslrpeacrpaaggavhtrgldfacdiylwaplagtcgvlllslvitl |
| | | yckrgrkkllyifkqpfmrpvqttqeedgcscrfpeeeeggcelrykfsrsadap |
| | | aykqgqnqlynelnlgrreeydvldkrrgrdpemggkprrknpqeglynelqkdk |
| | | [sequence omitted] |

CAR 3

| | | |
|---|---|---|
| CAR 3 scFV | 903 | qvqlqesgpglvkpsetlsltctvsgvslpdygyswirqppgkglewigviwgse |
| domain | | ttyyssslksrvtiskdnsknqvslklssvtaadtavyycakhyyyggsyamdyw |
| | | gqgtlvtvssggggsggggsggggseivmtqspatlslspgeratlscrasqdis |
| | | kylnwyqqkpgqaprlliyhtsrlhsgiparfsgsgsgtdytltisslqpedfav |
| | | yfcqqgntlpytfgqgtkleik |
| 103104 | 904 | atggctctgcccgtgaccgcactcctcctgccactggctctgctgcttcacgccg |
| CAR 3 - | | ctcgcccacaagtccagcttcaagaatcagggcctggtctggtgaagccatctga |
| Soluble | | gactctgtccctcacttgcaccgtgagcggagtgtccctcccagactacggagtg |
| scFv - nt | | agctggattagacagcctcccggaaagggactggagtggatcggagtgatttggg |
| | | gtagcgaaaccacttactattcatcttccctgaagtcacgggtcaccatttcaaa |
| | | ggataactcaaagaatcaagtgagcctcaagctctcatcagtcaccgccgctgac |
| | | accgccgtgtattactgtgccaagcattactactatggagggtcctacgccatgg |
| | | actactggggccagggaactctggtcactgtgtcatctggtggaggaggtagcgg |
| | | aggaggcgggagcggtggaggtggctccgaaatcgtgatgacccagagccctgca |
| | | accctgtccctttctcccggggaacgggctaccctttcttgtcgggcatcacaag |
| | | atatctcaaaatacctcaattggtatcaacagaagccgggacaggcccctaggct |
| | | tcttatctaccacacctctcgcctgcatagcgggattcccgcacgctttagcggg |
| | | tctggaagcgggaccgactacactctgaccatctcatctctccagcccgaggact |
| | | tcgccgtctacttctgccagcagggtaacaccctgccgtacaccttcggccaggg |
| | | caccaagcttgagatcaaacatcaccaccatcatcaccatcac |
| 103104 | 905 | MALPVTALLLPLALLLHAARPqvqlqesgpglvkpsetlsltctvsgvslpdygv |
| CAR 3 - | | swirgppgkglewigviwgsettyyssslksrvtiskdnsknqvslklssvtaad |
| Soluble | | tavyycakhyyyggsyamdywgggtlvtvssggggsggggsggggseivmtgspa |
| scFv - aa | | tlslspgeratlscrasgdiskylnwyggkpggaprlliyhtsrlhsgiparfsg |
| | | sgsgtdytltissigpedfavyfcqqgntlpytfgqgtkleikhhhhhhhh |
| 104877 | 906 | atggctctgcccgtgaccgcactcctcctgccactggctctgctgcttcacgccg |
| CAR 3 - | | ctcgcccacaagtccagcttcaagaatcagggcctggtctggtgaagccatctga |
| Full - nt | | gactctgtccctcacttgcaccgtgagcggagtgtccctcccagactacggagtg |
| | | agctggattagacagcctcccggaaagggactggagtggatcggagtgatttggg |
| | | gtagcgaaaccacttactattcatcttccctgaagtcacgggtcaccatttcaaa |
| | | ggataactcaaagaatcaagtgagcctcaagctctcatcagtcaccgccgctgac |
| | | accgccgtgtattactgtgccaagcattactactatggagggtcctacgccatgg |
| | | actactggggccagggaactctggtcactgtgtcatctggtggaggaggtagcgg |
| | | aggaggcgggagcggtggaggtggctccgaaatcgtgatgacccagagccctgca |
| | | accctgtccctttctcccggggaacgggctaccctttcttgtcgggcatcacaag |
| | | atatctcaaaatacctcaattggtatcaacagaagccgggacaggcccctaggct |
| | | tcttatctaccacacctctcgcctgcatagcgggattcccgcacgctttagcggg |
| | | tctggaagcgggaccgactacactctgaccatctcatctctccagcccgaggact |
| | | tcgccgtctacttctgccagcagggtaacaccctgccgtacaccttcggccaggg |
| | | caccaagcttgagatcaaaaccactactcccgctccaaggccacccacccctgcc |
| | | ccgaccatcgcctctcagccgctttccctgcgtccggaggcatgtagacccgcag |
| | | ctggtggggccgtgcatacccggggtcttgacttcgcctgcgatatctacatttg |
| | | ggcccctctggctggtacttgcggggtcctgctgctttcactcgtgatcactctt |
| | | tactgtaagcgcggtcggaagaagctgctgtacatctttaagcaacccttcatga |
| | | ggcctgtgcagactactcaagaggaggacggctgttcatgccggttcccagagga |
| | | ggaggaaggcggctgcgaactgcgcgtgaaattcagccgcagcgcagatgctcca |
| | | gcctacaagcaggggcagaaccagctctacaacgaactcaatcttggtcggagag |
| | | aggagtacgacgtgctggacaagcggagaggacgggacccagaaatgggcgggaa |
| | | gccgcgcagaaagaatccccaagagggcctgtacaacgagctccaaaaggataag |
| | | atggcagaagcctatagcgagattggtatgaaaggggaacgcagaagaggcaaag |
| | | gccacgacggactgtaccagggactcagcaccgccaccaaggacacctatgacgc |
| | | tcttcacatgcaggccctgccgcctcgg |
| 104877 | 907 | MALPVTALLLPLALLLHAARPqvqlqesgpglvkpsetlsltctvsgvslpdygv |
| CAR 3 | | swirgppgkglewigviwgsettyyssslksrvtiskdnsknqvslklssvtaad |
| Full - aa | | tavyycakhyyyggsyamdywgqgtlvtvssggggsggggsggggseivmtgspa |
| | | tisispgeratlscrasqdiskylnwyggkpgqaprlliyhtsrlhsgiparfsg |
| | | sgsgtdytltisslqpedfavyfcqqgntlpytfgqgtkleiktttpaprpptpa |
| | | ptiasqplslrpeacrpaaggavhtrgldfacdiyiwaplagtcgvlllsivitl |
| | | yckrgrkkllyifkqpfmrpvqttqeedgcscrfpeeeeggcelrykfsrsadap |
| | | aykqgqnqlynelnlgrreeydvidkrrgrdpemggkprrknpqeglynelqkdk |
| | | maeayseigmkgerrrgkghdglyggistatkdtydalhmqalppr |

CAR 4

| | | |
|---|---|---|
| CAR 4 scFv | 908 | qvqlgesgpglvkpsetlsltctvsgvslpdygvswirgppgkglewigviwgse |
| domain | | ttyyqsslksrvtiskdnsknqvslklssvtaadtavyycakhyyyggsyamdyw |
| | | gqgtlvtvssggggsggggsggggseivmtqspatlslspgeratlscrasqdis |
| | | kylnwyqqkpgqaprlliyhtsrlhsgiparfsgsgsgtdytltisslqpedfav |
| | | yfcqqgntlpytfgqgtkleik |
| 103106 | 909 | atggctctgcccgtgaccgcactcctcctgccactggctctgctgcttcacgccg |
| CAR 4 - | | ctcgcccacaagtccagcttcaagaatcagggcctggtctggtgaagccatctga |
| Soluble | | gactctgtccctcacttgcaccgtgagcggagtgtccctcccagactacggagtg |
| scFv - nt | | agctggattagacagcctcccggaaagggactggagtggatcggagtgatttggg |
| | | gtagcgaaaccacttactatcaatcttccctgaagtcacgggtcaccatttcaaa |
| | | ggataactcaaagaatcaagtgagcctcaagctctcatcagtcaccgccgctgac |
| | | accgccgtgtattactgtgccaagcattactactatggagggtcctacgccatgg |
| | | actactggggccagggaactctggtcactgtgtcatctggtggaggaggtagcgg |
| | | aggaggcgggagcggtggaggtggctccgaaatcgtgatgacccagagccctgca |
| | | accctgtccctttctcccggggaacgggctaccctttcttgtcgggcatcacaag |
| | | atatctcaaaatacctcaattggtatcaacagaagccgggacaggcccctaggct |
| | | tcttatctaccacacctctcgcctgcatagcgggattcccgcacgctttagcggg |
| | | tctggaagcgggaccgactacactctgaccatctcatctctccagcccgaggact |
| | | tcgccgtctacttctgccagcagggtaacaccctgccgtacaccttcggccaggg |
| | | caccaagcttgagatcaaacatcaccaccatcatcaccatcac |
| 103106 | 910 | MALPVTALLLPLALLLHAARPqvqlqesgpglvkpsetlsltctvsgvslpdygv |
| CAR 4 - | | swirqppgkglewigviwgsettyyqsslksrvtiskdnsknqvslklssvtaad |
| Soluble | | tavyycakhyyyggsyamdywgqgtlvtvssggggsggggsggggseivmtqspa |
| scFv -aa | | tlslspgeratlscrasqdiskylnwyqqkpgqaprlliyhtsrlhsgiparfsg |
| | | sgsgtdytltisslqpedfavyfcqqgntlpytfgpgtkleikhhhhhhhh |
| 104878 | 911 | atggctctgcccgtgaccgcactcctcctgccactggctctgctgcttcacgccg |
| CAR 4 - | | ctcgcccacaagtccagcttcaagaatcagggcctggtctggtgaagccatctga |
| Full - nt | | gactctgtccctcacttgcaccgtgagcggagtgtccctcccagactacggagtg |
| | | agctggattagacagcctcccggaaagggactggagtggatcggagtgatttggg |
| | | gtagcgaaaccacttactatcaatcttccctgaagtcacgggtcaccatttcaaa |
| | | ggataactcaaagaatcaagtgagcctcaagctctcatcagtcaccgccgctgac |
| | | accgccgtgtattactgtgccaagcattactactatggagggtcctacgccatgg |
| | | actactggggccagggaactctggtcactgtgtcatctggtggaggaggtagcgg |
| | | aggaggcgggagcggtggaggtggctccgaaatcgtgatgacccagagccctgca |
| | | accctgtccctttctcccggggaacgggctaccctttcttgtcgggcatcacaag |
| | | atatctcaaaatacctcaattggtatcaacagaagccgggacaggcccctaggct |
| | | tcttatctaccacacctctcgcctgcatagcgggattcccgcacgctttagcggg |
| | | tctggaagcgggaccgactacactctgaccatctcatctctccagcccgaggact |
| | | tcgccgtctacttctgccagcagggtaacaccctgccgtacaccttcggccaggg |
| | | caccaagcttgagatcaaaaccactactcccgctccaaggccacccacccctgcc |
| | | ccgaccatcgcctctcagccgctttccctgcgtccggaggcatgtagacccgcag |
| | | ctggtggggccgtgcatacccggggtcttgacttcgcctgcgatatctacatttg |
| | | ggcccctctggctggtacttgcggggtcctgctgctttcactcgtgatcactctt |
| | | tactgtaagcgcggtcggaagaagctgctgtacatctttaagcaacccttcatga |
| | | ggcctgtgcagactactcaagaggaggacggctgttcatgccggttcccagagga |
| | | ggaggaaggcggctgcgaactgcgcgtgaaattcagccgcagcgcagatgctcca |
| | | gcctacaagcaggggcagaaccagctctacaacgaactcaatcttggtcggagag |
| | | aggagtacgacgtgctggacaagcggagaggacgggacccagaaatgggcgggaa |
| | | gccgcgcagaaagaatccccaagagggcctgtacaacgagctccaaaaggataag |
| | | atggcagaagcctatagcgagattggtatgaaaggggaacgcagaagaggcaaag |
| | | gccacgacggactgtaccagggactcagcaccgccaccaaggacacctatgacgc |
| | | tcttcacatgcaggccctgccgcctcgg |
| 104878 | 912 | MALPVTALLLPLALLLHAARPqvqlqesgpglvkpsetlsltctvsgvslpdygv |
| CAR 4 - | | swirgppgkglewigviwgsettyyqsslksrvtiskdnsknqvslklssvtaad |
| Full - aa | | tavyycakhyyyggsyamdywgqgtlvtvssggggsggggsggggseivmtgspa |
| | | tlslspgeratlscrasqdiskylnwyqqkpgqaprlliyhtsrlhsgiparfsg |
| | | sgsgtdytltisslgpedfavyfcqqgntlpytfgqgtkleiktttpaprpptpa |
| | | ptiasgplslrpeacrpaaggavhtrgldfacdiyiwaplagtcgvlllslvitl |
| | | yckrgrkkllyifkgpfmrpvgttqeedgcscrfpeeeeggcelrvkfsrsadap |
| | | aykgggnglynelnlgrreeydvldkrrgrdpemggkprrknpqeglynelgkdk |
| | | maeayseigmkgerrrgkghdglygglstatkdtydalhmqalppr |

CAR 5

| | | |
|---|---|---|
| CAR5 scFv | 913 | eivmtqspatlslspgeratlscrasqdiskylnwyggkpgqaprlliyhtsrlh |
| domain | | sgiparfsgsgsgtdytltisslgpedfavyfcqqgntlpytfgqgtkleikggg |
| | | gsggggsggggsggggsqvqlgesgpglvkpsetlsltctvsgvslpdygvswir |
| | | gppgkglewigviwgsettyyssslksrvtiskdnsknqvslklssvtaadtavy |
| | | ycakhyyyggsyamdywgggtlvtvss |
| 99789 | 914 | atggccctcccagtgaccgctctgctgctgcctctcgcacttcttctccatgccg |
| CAR 5 - | | ctcggcctgagatcgtcatgacccaaagccccgctaccctgtccctgtcacccgg |
| Soluble | | cgagagggcaaccctttcatgcagggccagccaggacatttctaagtacctcaac |
| scFv - nt | | tggtatcagcagaagccagggcaggctcctcgcctgctgatctaccacaccagcc |
| | | gcctccacagcggtatccccgccagattttccgggagcgggtctggaaccgacta |
| | | caccctcaccatctcttctctgcagcccgaggatttcgccgtctatttctgccag |
| | | caggggaatactctgccgtacaccttcggtcaaggtaccaagctggaaatcaagg |
| | | gaggcggaggatcaggcggtggcggaagcggaggaggtggctccggaggaggagg |
| | | ttcccaagtgcagcttcaagaatcaggacccggacttgtgaagccatcagaaacc |
| | | ctctccctgacttgtaccgtgtccggtgtgagcctccccgactacggagtctctt |
| | | ggattcgccagcctccggggaagggtcttgaatggattggggtgatttggggatc |
| | | agagactacttactactcttcatcacttaagtcacgggtcaccatcagcaaagat |
| | | aatagcaagaaccaagtgtcacttaagctgtcatctgtgaccgccgctgacaccg |
| | | ccgtgtactattgtgccaaacattactattacggagggtcttatgctatggacta |
| | | ctggggacaggggaccctggtgactgtctctagccatcaccatcaccaccatcat |
| | | cac |
| 99789 | 915 | MALPVTALLLPLALLLHAARPeivmtqspatlslspgeratlscrasgdiskyln |
| CAR 5 - | | wyqqkpgqaprlliyhtsrlhsgiparfsgsgsgtdytltisslgpedfavyfcq |
| Soluble | | qgntlpytfgqgtkleikggggsggggsggggsggggsqvqlgesgpglvkpset |
| scFv - aa | | lsltctvsgvslpdygyswirqppgkglewigviwgsettyyssslksrvtiskd |
| | | nskngvslklssvtaadtavyycakhyyyggsyamdywgggtlvtvsshhhhhhh |
| | | h |
| 104879 | 916 | atggccctccctgtcaccgccctgctgcttccgctggctcttctgctccacgccg |
| CAR 5 - | | ctcggcccgaaattgtgatgacccagtcacccgccactcttagcctttcacccgg |
| Full - nt | | tgagcgcgcaaccctgtcttgcagagcctcccaagacatctcaaaataccttaat |
| | | tggtatcaacagaagcccggacaggctcctcgccttctgatctaccacaccagcc |
| | | ggctccattctggaatccctgccaggttcagcggtagcggatctgggaccgacta |
| | | caccctcactatcagctcactgcagccagaggacttcgctgtctatttctgtcag |
| | | caagggaacaccctgccctacacctttggacagggcaccaagctcgagattaaag |
| | | gtggaggtggcagcggaggaggtgggtccggcggtggaggaagcggcggaggcgg |
| | | gagccaggtccaactccaagaaagcggaccgggtcttgtgaagccatcagaaact |
| | | ctttcactgacttgtactgtgagcggagtgtctctccccgattacggggtgtctt |
| | | ggatcagacagccaccggggaagggtctggaatggattggagtgatttggggctc |
| | | tgagactacttactactcttcatccctcaagtcacgcgtcaccatctcaaaggac |
| | | aactctaagaatcaggtgtcactgaaactgtcatctgtgaccgcagccgacaccg |
| | | ccgtgtactattgcgctaagcattactattatggcgggagctacgcaatggatta |
| | | ctggggacagggtactctggtcaccgtgtccagcaccactaccccagcaccgagg |
| | | ccacccaccccggctcctaccatcgcctcccagcctctgtccctgcgtccggagg |
| | | catgtagacccgcagctggtggggccgtgcatacccggggtcttgacttcgcctg |
| | | cgatatctacatttgggcccctctggctggtacttgcggggtcctgctgctttca |
| | | ctcgtgatcactctttactgtaagcgcggtcggaagaagctgctgtacatcttta |
| | | agcaacccttcatgaggcctgtgcagactactcaagaggaggacggctgttcatg |
| | | ccggttcccagaggaggaggaaggcggctgcgaactgcgcgtgaaattcagccgc |
| | | agcgcagatgctccagcctacaagcaggggcagaaccagctctacaacgaactca |
| | | atcttggtcggagagaggagtacgacgtgctggacaagcggagaggacgggaccc |
| | | agaaatgggcgggaagccgcgcagaaagaatccccaagagggcctgtacaacgag |
| | | ctccaaaaggataagatggcagaagcctatagcgagattggtatgaaaggggaac |
| | | gcagaagaggcaaaggccacgacggactgtaccagggactcagcaccgccaccaa |
| | | ggacacctatgacgctcttcacatgcaggccctgccgcctcgg |
| 104879 | 917 | MALPVTALLLPLALLLHAARPeivmtqspatlslspgeratlscrasqdiskyln |
| CAR 5 - | | wyggkpggaprlliyhtsrlhsgiparfsgsgsgtdytltissigpedfavyfcq |
| Full - aa | | qgntlpytfgqgtkleikggggsggggsggggsggggsqvqlqesgpglvkpset |
| | | lsltctvsgvslpdygvswirqppgkglewigviwgsettyyssslksrvtiskd |
| | | nsknqvslklssvtaadtavyycakhyyyggsyamdywgqgtlvtvsstttpapr |
| | | pptpaptiasqplslrpeacrpaaggavhtrgldfacdiyiwaplagtcgvllls |
| | | lvitlyckrgrkkllyifkgpfmrpvgttqeedgcscrfpeeeeggcelrykfsr |
| | | sadapaykqgqnqlynelnlgrreeydvldkrrgrdpemggkprrknpqeglyne |
| | | lgkdkmaeayseigmkgerrrgkghdglygglstatkdtydalhmqalppr |

CAR 6

| | | |
|---|---|---|
| CAR 6 | 918 | eivmtqspatlslspgeratlscrasgdiskylnwyggkpgqaprlliyhtsrlh |
| scFv | | sgiparfsgsgsgtdytltisslqpedfavyfcqqgntlpytfgqgtkleikggg |
| domain | | gsggggsggggsggggsqvqlqesgpglvkpsetlsltctvsgvslpdygvswir |
| | | qppgkglewigviwgsettyygsslksrvtiskdnsknqvslklssvtaadtavy |
| | | ycakhyyyggsyamdywgqgtlvtvss |
| 99790 | 919 | atggccctcccagtgaccgctctgctgctgcctctcgcacttcttctccatgccg |
| CAR 6 - | | ctcggcctgagatcgtcatgacccaaagccccgctaccctgtccctgtcacccgg |
| Soluble | | cgagagggcaaccctttcatgcagggccagccaggacatttctaagtacctcaac |
| scFv - nt | | tggtatcagcagaagccagggcaggctcctcgcctgctgatctaccacaccagcc |
| | | gcctccacagcggtatccccgccagattttccgggagcgggtctggaaccgacta |
| | | caccctcaccatctcttctctgcagcccgaggatttcgccgtctatttctgccag |
| | | caggggaatactctgccgtacaccttcggtcaaggtaccaagctggaaatcaagg |
| | | gaggcggaggatcaggcggtggcggaagcggaggaggtggctccggaggaggagg |
| | | ttcccaagtgcagcttcaagaatcaggacccggacttgtgaagccatcagaaacc |
| | | ctctccctgacttgtaccgtgtccggtgtgagcctccccgactacggagtctctt |
| | | ggattcgccagcctccggggaagggtcttgaatggattggggtgatttggggatc |
| | | agagactacttactaccagtcatcacttaagtcacgggtcaccatcagcaaagat |
| | | aatagcaagaaccaagtgtcacttaagctgtcatctgtgaccgccgctgacaccg |
| | | ccgtgtactattgtgccaaacattactattacggagggtcttatgctatggacta |
| | | ctggggacaggggaccctggtgactgtctctagccatcaccatcaccaccatcat |
| | | cac |
| 99790 | 920 | MALPVTALLLPLALLLHAARPeivmtqspatlslspgeratlscrasqdiskyln |
| CAR 6 - | | wyggkpgqaprlliyhtsrlhsgiparfsgsgsgtdytltissigpedfavyfcq |
| Soluble | | qgntlpytfgqgtkleikggggsggggsggggsggggsqvqlqesgpglvkpset |
| scFv - aa | | lsltctvsgyslpdygyswirqppgkglewigviwgsettyygsslksrvtiskd |
| | | nsknqvslklssvtaadtavyycakhyyyggsyamdywgqgtlvtvsshhhhhhh |
| | | h |
| 104880 | 921 | atggccctccctgtcaccgccctgctgcttccgctggctcttctgctccacgccg |
| CAR 6 - | | ctcggcccgaaattgtgatgacccagtcacccgccactcttagcctttcacccgg |
| Full - nt | | tgagcgcgcaaccctgtcttgcagagcctcccaagacatctcaaaataccttaat |
| | | tggtatcaacagaagcccggacaggctcctcgccttctgatctaccacaccagcc |
| | | ggctccattctggaatccctgccaggttcagcggtagcggatctgggaccgacta |
| | | caccctcactatcagctcactgcagccagaggacttcgctgtctatttctgtcag |
| | | caagggaacaccctgccctacacctttggacagggcaccaagctcgagattaaag |
| | | gtggaggtggcagcggaggaggtgggtccggcggtggaggaagcggaggcggagg |
| | | gagccaggtccaactccaagaaagcggaccgggtcttgtgaagccatcagaaact |
| | | ctttcactgacttgtactgtgagcggagtgtctctccccgattacggggtgtctt |
| | | ggatcagacagccaccggggaagggtctggaatggattggagtgatttggggctc |
| | | tgagactacttactaccaatcatccctcaagtcacgcgtcaccatctcaaaggac |
| | | aactctaagaatcaggtgtcactgaaactgtcatctgtgaccgcagccgacaccg |
| | | ccgtgtactattgcgctaagcattactattatggcgggagctacgcaatggatta |
| | | ctggggacagggtactctggtcaccgtgtccagcaccactaccccagcaccgagg |
| | | ccacccaccccggctcctaccatcgcctcccagcctctgtccctgcgtccggagg |
| | | catgtagacccgcagctggtggggccgtgcatacccggggtcttgacttcgcctg |
| | | cgatatctacatttgggcccctctggctggtacttgcggggtcctgctgctttca |
| | | ctcgtgatcactctttactgtaagcgcggtcggaagaagctgctgtacatcttta |
| | | agcaacccttcatgaggcctgtgcagactactcaagaggaggacggctgttcatg |
| | | ccggttcccagaggaggaggaaggcggctgcgaactgcgcgtgaaattcagccgc |
| | | agcgcagatgctccagcctacaagcaggggcagaaccagctctacaacgaactca |
| | | atcttggtcggagagaggagtacgacgtgctggacaagcggagaggacgggaccc |
| | | agaaatgggcgggaagccgcgcagaaagaatccccaagagggcctgtacaacgag |
| | | ctccaaaaggataagatggcagaagcctatagcgagattggtatgaaaggggaac |
| | | gcagaagaggcaaaggccacgacggactgtaccagggactcagcaccgccaccaa |
| | | ggacacctatgacgctcttcacatgcaggccctgccgcctcgg |
| 104880 | 922 | MALPVTALLLPLALLLHAARPeivmtqspatlslspgeratlscrasqdiskyln |
| CAR 6 - | | wyqqkpgqaprlliyhtsrlhsgiparfsgsgsgtdytltisslqpedfavyfcq |
| Full - aa | | qgntlpytfgqgtkleikggggsggggsggggsggggsqvqlqesgpglvkpset |
| | | lsltctvsgvslpdygvswirqppgkglewigviwgsettyygsslksrvtiskd |
| | | nsknqvslklssvtaadtavyycakhyyyggsyamdywgqgtlvtvsstttpapr |
| | | pptpaptiasgplslrpeacrpaaggavhtrgldfacdiyiwaplagtcgvllls |
| | | lvitlyckrgrkkllyifkgpfmrpvgttqeedgcscrfpeeeeggcelrvkfsr |
| | | sadapaykgggnglynelnlgrreeydvldkrrgrdpemggkprrknpqeglyne |
| | | lgkdkmaeayseigmkgerrrgkghdglygglstatkdtydalhmqalppr |

CAR 7

| | | |
|---|---|---|
| CAR 7 scFv | 923 | qvqlqesgpglvkpsetlsltctvsgvslpdygvswirgppgkglewigviwgse |
| domain | | ttyyssslksrvtiskdnsknqvslklssvtaadtavyycakhyyyggsyamdyw |
| | | gqgtlvtvssggggsggggsggggsggggseivmtqspatlslspgeratlscra |
| | | sqdiskylnwyqqkpgqaprlliyhtsrinsgiparfsgsgsgtdytltisslqp |
| | | edfavyfcqqgntlpytfgqgtkleik |
| 100796 | 924 | atggcactgcctgtcactgccctcctgctgcctctggccctccttctgcatgccg |
| CAR 7 - | | ccaggccccaagtccagctgcaagagtcaggacccggactggtgaagccgtctga |
| Soluble | | gactctctcactgacttgtaccgtcagcggcgtgtccctccccgactacggagtg |
| scFv - nt | | tcatggatccgccaacctcccgggaaagggcttgaatggattggtgtcatctggg |
| | | gttctgaaaccacctactactcatcttccctgaagtccagggtgaccatcagcaa |
| | | ggataattccaagaaccaggtcagccttaagctgtcatctgtgaccgctgctgac |
| | | accgccgtgtattactgcgccaagcactactattacggaggaagctacgctatgg |
| | | actattggggacagggcactctcgtgactgtgagcagcggcggtggagggtctgg |
| | | aggtggaggatccggtggtggtgggtcaggcggaggagggagcgagattgtgatg |
| | | actcagtcaccagccaccctttctctttcacccggcgagagagcaaccctgagct |
| | | gtagagccagccaggacatttctaagtacctcaactggtatcagcaaaaaccggg |
| | | gcaggcccctcgcctcctgatctaccatacctcacgccttcactctggtatcccc |
| | | gctcggtttagcggatcaggatctggtaccgactacactctgaccatttccagcc |
| | | tgcagccagaagatttcgcagtgtatttctgccagcagggcaatacccttcctta |
| | | caccttcggtcagggaaccaagctcgaaatcaagcaccatcaccatcatcaccac |
| | | cat |
| 100796 | 925 | MALPVTALLLPLALLLHAARPqvqlqesgpglvkpsetlsltctvsgvslpdygv |
| CAR 7 - | | swirqppgkglewigviwgsettyyssslksrvtiskdnsknqvslklssvtaad |
| Soluble | | tavyycaknyyyggsyamdywgqgtlvtvssggggsggggsggggsggggseivm |
| scFv - aa | | tqspatlslspgeratlscrasqdiskylnwyqqkpgqaprlliyhtsrinsgip |
| | | arfsgsgsgtdytltisslqpedfavyfcqqgntlpytfgqgtkleikhhhhhhh |
| | | h |
| 104881 | 926 | atggctctgcccgtgaccgcactcctcctgccactggctctgctgcttcacgccg |
| CAR 7 | | ctcgcccacaagtccagcttcaagaatcagggcctggtctggtgaagccatctga |
| Full - nt | | gactctgtccctcacttgcaccgtgagcggagtgtccctcccagactacggagtg |
| | | agctggattagacagcctcccggaaagggactggagtggatcggagtgatttggg |
| | | gtagcgaaaccacttactattcatcttccctgaagtcacgggtcaccatttcaaa |
| | | ggataactcaaagaatcaagtgagcctcaagctctcatcagtcaccgccgctgac |
| | | accgccgtgtattactgtgccaagcattactactatggagggtcctacgccatgg |
| | | actactggggccagggaactctggtcactgtgtcatctggtggaggaggtagcgg |
| | | aggaggcgggagcggtggaggtggctccggaggtggcggaagcgaaatcgtgatg |
| | | acccagagccctgcaaccctgtccctttctcccggggaacgggctaccctttctt |
| | | gtcgggcatcacaagatatctcaaaatacctcaattggtatcaacagaagccggg |
| | | acaggcccctaggcttcttatctaccacacctctcgcctgcatagcgggattccc |
| | | gcacgctttagcgggtctggaagcgggaccgactacactctgaccatctcatctc |
| | | tccagcccgaggacttcgccgtctacttctgccagcagggtaacaccctgccgta |
| | | caccttcggccagggcaccaagcttgagatcaaaaccactactcccgctccaagg |
| | | ccacccacccctgccccgaccatcgcctctcagccgctttccctgcgtccggagg |
| | | catgtagacccgcagctggtggggccgtgcatacccggggtcttgacttcgcctg |
| | | cgatatctacatttgggcccctctggctggtacttgcggggtcctgctgctttca |
| | | ctcgtgatcactctttactgtaagcgcggtcggaagaagctgctgtacatcttta |
| | | agcaacccttcatgaggcctgtgcagactactcaagaggaggacggctgttcatg |
| | | ccggttcccagaggaggaggaaggcggctgcgaactgcgcgtgaaattcagccgc |
| | | agcgcagatgctccagcctacaagcaggggcagaaccagctctacaacgaactca |
| | | atcttggtcggagagaggagtacgacgtgctggacaagcggagaggacgggaccc |
| | | agaaatgggcgggaagccgcgcagaaagaatccccaagagggcctgtacaacgag |
| | | ctccaaaaggataagatggcagaagcctatagcgagattggtatgaaaggggaac |
| | | gcagaagaggcaaaggccacgacggactgtaccagggactcagcaccgccaccaa |
| | | ggacacctatgacgctcttcacatgcaggccctgccgcctcgg |
| 104881 | 927 | MALPVTALLLPLALLLHAARPqvqlqesgpglvkpsetlsltctvsgvslpdygv |
| CAR 7 | | swirqppgkglewigviwgsettyyssslksrvtiskdnsknqvslklssvtaad |
| Full - aa | | tavyycakhyyyggsyamdywgqgtlvtvssggggsggggsggggsggggseivm |
| | | tqspatlslspgeratlscrasqdiskylnwyqqkpgqaprlliyhtsrlhsgip |
| | | arfsgsgsgtdytltisslqpedfavyfcqqgntlpytfgqgtkleiktttpapr |
| | | pptpaptiasqplslrpeacrpaaggavhtrgldfacdiyiwaplagtcgvllls |
| | | lvitlyckrgrkkllyifkqpfmrpvqttqeedgcscrfpeeeeggcelrvkfsr |
| | | sadapaykqgqnqlynelnlgrreeydvldkrrgrdpemggkprrknpqeglyne |
| | | lqkdkmaeayseigmkgerrrgkghdglyggistatkdtydalhmqalppr |

CAR 8

| | | |
|---|---|---|
| CAR 8 scFv | 928 | qvqlqesgpglvkpsetlsltctvsgvslpdygvswirqppgkglewigviwgse |
| domain | | ttyyqsslksrvtiskdnsknqvslklssvtaadtavyycakhyyyggsyamdyw |
| | | gqgtlvtvssggggsggggsggggsggggseivmtqspatlslspgeratlscra |
| | | sqdiskylnwyqqkpgqaprlliyhtsrlhsgiparfsgsgsgtdytltisslqp |
| | | edfavyfcqqgntlpytfgqgtkleik |
| 100798 | 929 | atggcactgcctgtcactgccctcctgctgcctctggccctccttctgcatgccg |
| CAR 8 - | | ccaggccccaagtccagctgcaagagtcaggacccggactggtgaagccgtctga |
| Soluble | | gactctctcactgacttgtaccgtcagcggcgtgtccctccccgactacggagtg |
| scFV - nt | | tcatggatccgccaacctcccgggaaagggcttgaatggattggtgtcatctggg |
| | | gttctgaaaccacctactaccagtcttccctgaagtccagggtgaccatcagcaa |
| | | ggataattccaagaaccaggtcagccttaagctgtcatctgtgaccgctgctgac |
| | | accgccgtgtattactgcgccaagcactactattacggaggaagctacgctatgg |
| | | actattggggacagggcactctcgtgactgtgagcagcggcggtggagggtctgg |
| | | aggtggaggatccggtggtggtgggtcaggcggaggagggagcgagattgtgatg |
| | | actcagtcaccagccaccctttctctttcacccggcgagagagcaaccctgagct |
| | | gtagagccagccaggacatttctaagtacctcaactggtatcagcaaaaaccggg |
| | | gcaggcccctcgcctcctgatctaccatacctcacgccttcactctggtatcccc |
| | | gctcggtttagcggatcaggatctggtaccgactacactctgaccatttccagcc |
| | | tgcagccagaagatttcgcagtgtatttctgccagcagggcaatacccttcctta |
| | | caccttcggtcagggaaccaagctcgaaatcaagcaccatcaccatcatcatcac |
| | | cac |
| 100798 | 930 | MALPVTALLLPLALLLHAARPqvqlqesgpglvkpsetlsltctvsgvslpdygv |
| CAR 8 - | | swirgppgkglewigviwgsettyygsslksrvtiskdnsknqvslklssvtaad |
| Soluble | | tavyycakhyyyggsyamdywgggtlvtvssggggsggggsggggsggggseivm |
| scFv - aa | | tgspatlslspgeratlscrasgdiskylnwyggkpgqaprlliyhtsrlhsgip |
| | | arfsgsgsgtdytltisslgpedfavyfcqqgntlpytfgqgtkleikhhhhhhh |
| | | h |
| 104882 | 931 | atggctctgcccgtgaccgcactcctcctgccactggctctgctgcttcacgccg |
| CAR 8 - | | ctcgcccacaagtccagcttcaagaatcagggcctggtctggtgaagccatctga |
| Full - nt | | gactctgtccctcacttgcaccgtgagcggagtgtccctcccagactacggagtg |
| | | agctggattagacagcctcccggaaagggactggagtggatcggagtgatttggg |
| | | gtagcgaaaccacttactatcaatcttccctgaagtcacgggtcaccatttcaaa |
| | | ggataactcaaagaatcaagtgagcctcaagctctcatcagtcaccgccgctgac |
| | | accgccgtgtattactgtgccaagcattactactatggagggtcctacgccatgg |
| | | actactggggccagggaactctggtcactgtgtcatctggtggaggaggtagcgg |
| | | aggaggcgggagcggtggaggtggctccggaggcggtgggtcagaaatcgtgatg |
| | | acccagagccctgcaaccctgtccctttctcccggggaacgggctaccctttctt |
| | | gtcgggcatcacaagatatctcaaaatacctcaattggtatcaacagaagccggg |
| | | acaggcccctaggcttcttatctaccacacctctcgcctgcatagcgggattccc |
| | | gcacgctttagcgggtctggaagcgggaccgactacactctgaccatctcatctc |
| | | tccagcccgaggacttcgccgtctacttctgccagcagggtaacaccctgccgta |
| | | caccttcggccagggcaccaagcttgagatcaaaaccactactcccgctccaagg |
| | | ccacccacccctgccccgaccatcgcctctcagccgctttccctgcgtccggagg |
| | | catgtagacccgcagctggtggggccgtgcatacccggggtcttgacttcgcctg |
| | | cgatatctacatttgggcccctctggctggtacttgcggggtcctgctgctttca |
| | | ctcgtgatcactctttactgtaagcgcggtcggaagaagctgctgtacatcttta |
| | | agcaacccttcatgaggcctgtgcagactactcaagaggaggacggctgttcatg |
| | | ccggttcccagaggaggaggaaggcggctgcgaactgcgcgtgaaattcagccgc |
| | | agcgcagatgctccagcctacaagcaggggcagaaccagctctacaacgaactca |
| | | atcttggtcggagagaggagtacgacgtgctggacaagcggagaggacgggaccc |
| | | agaaatgggcgggaagccgcgcagaaagaatccccaagagggcctgtacaacgag |
| | | ctccaaaaggataagatggcagaagcctatagcgagattggtatgaaaggggaac |
| | | gcagaagaggcaaaggccacgacggactgtaccagggactcagcaccgccaccaa |
| | | ggacacctatgacgctcttcacatgcaggccctgccgcctcgg |
| 104882 | 932 | MALPVTALLLPLALLLHAARPqvqlqesgpglvkpsetlsltctvsgvslpdygv |
| CAR 8 - | | swirqppgkglewigviwgsettyyqsslksrvtiskdnsknqvslklssvtaad |
| Full - aa | | tavyycakhyyyggsyamdywgqgtlvtvssggggsggggsggggsggggseivm |
| | | tqspatlslspgeratlscrasqdiskylnwyqqkpgqaprlliyhtsrlhsgip |
| | | arfsgsgsgtdytltisslqpedfavyfcqqgntlpytfgqgtkleiktttpapr |
| | | pptpaptiasgplslrpeacrpaaggavhtrgldfacdiyiwaplagtcgvllls |
| | | lvitlyckrgrkkllyifkgpfmrpvgttqeedgcscrfpeeeeggcelrykfsr |
| | | sadapaykgggnglynelnlgrreeydvidkrrgrdpemggkprrknpqeglyne |
| | | lgkdkmaeayseigmkgerrrgkghdglyggistatkdtydalhmqalppr |

CAR 9

| | | |
|---|---|---|
| CAR 9 scFv | 933 | eivmtqspatlslspgeratlscrasgdiskylnwyggkpgqaprlliyhtsrlh |
| domain | | sgiparfsgsgsgtdytltisslqpedfavyfcqqgntlpytfgqgtkleikggg |
| | | gsggggsggggsggggsqvqlqesgpglvkpsetlsltctvsgvslpdygvswir |
| | | qppgkglewigviwgsettyynsslksrvtiskdnsknqvslklssvtaadtavy |
| | | ycakhyyyggsyamdywgqgtlvtvss |
| 99789 | 934 | atggccctcccagtgaccgctctgctgctgcctctcgcacttcttctccatgccg |
| CAR 9 - | | ctcggcctgagatcgtcatgacccaaagccccgctaccctgtccctgtcacccgg |
| Soluble | | cgagagggcaaccctttcatgcagggccagccaggacatttctaagtacctcaac |
| scFv - nt | | tggtatcagcagaagccagggcaggctcctcgcctgctgatctaccacaccagcc |
| | | gcctccacagcggtatccccgccagattttccgggagcgggtctggaaccgacta |
| | | caccctcaccatctcttctctgcagcccgaggatttcgccgtctatttctgccag |
| | | caggggaatactctgccgtacaccttcggtcaaggtaccaagctggaaatcaagg |
| | | gaggcggaggatcaggcggtggcggaagcggaggaggtggctccggaggaggagg |
| | | ttcccaagtgcagcttcaagaatcaggacccggacttgtgaagccatcagaaacc |
| | | ctctccctgacttgtaccgtgtccggtgtgagcctccccgactacggagtctctt |
| | | ggattcgccagcctccggggaagggtcttgaatggattggggtgatttggggatc |
| | | agagactacttactacaattcatcacttaagtcacgggtcaccatcagcaaagat |
| | | aatagcaagaaccaagtgtcacttaagctgtcatctgtgaccgccgctgacaccg |
| | | ccgtgtactattgtgccaaacattactattacggagggtcttatgctatggacta |
| | | ctggggacaggggaccctggtgactgtctctagccatcaccatcaccaccatcat |
| | | cac |
| 99789 | 935 | MALPVTALLLPLALLLHAARPeivmtqspatlslspgeratlscrasgdiskyln |
| CAR 9 - | | wyggkpgqaprlliyhtsrlhsgiparfsgsgsgtdytltissigpedfavyfcq |
| Soluble | | qgntlpytfgqgtkleikggggsggggsggggsggggsqvqlqesgpglvkpset |
| scFv - aa | | lsltctvsgyslpdygyswirqppgkglewigviwgsettyynsslksrvtiskd |
| | | nskngvslklssvtaadtavyycakhyyyggsyamdywgqgtlvtvsshhhhhhh |
| | | h |
| 105974 | 936 | atggccctccctgtcaccgccctgctgcttccgctggctcttctgctccacgccg |
| CAR 9 - | | ctcggcccgaaattgtgatgacccagtcacccgccactcttagcctttcacccgg |
| Full - nt | | tgagcgcgcaaccctgtcttgcagagcctcccaagacatctcaaaataccttaat |
| | | tggtatcaacagaagcccggacaggctcctcgccttctgatctaccacaccagcc |
| | | ggctccattctggaatccctgccaggttcagcggtagcggatctgggaccgacta |
| | | caccctcactatcagctcactgcagccagaggacttcgctgtctatttctgtcag |
| | | caagggaacaccctgccctacacctttggacagggcaccaagctcgagattaaag |
| | | gtggaggtggcagcggaggaggtgggtccggcggtggaggaagcggaggcggtgg |
| | | gagccaggtccaactccaagaaagcggaccgggtcttgtgaagccatcagaaact |
| | | ctttcactgacttgtactgtgagcggagtgtctctccccgattacggggtgtctt |
| | | ggatcagacagccaccggggaagggtctggaatggattggagtgatttggggctc |
| | | tgagactacttactacaactcatccctcaagtcacgcgtcaccatctcaaaggac |
| | | aactctaagaatcaggtgtcactgaaactgtcatctgtgaccgcagccgacaccg |
| | | ccgtgtactattgcgctaagcattactattatggcgggagctacgcaatggatta |
| | | ctggggacagggtactctggtcaccgtgtccagcaccactaccccagcaccgagg |
| | | ccacccaccccggctcctaccatcgcctcccagcctctgtccctgcgtccggagg |
| | | catgtagacccgcagctggtggggccgtgcatacccggggtcttgacttcgcctg |
| | | cgatatctacatttgggcccctctggctggtacttgcggggtcctgctgctttca |
| | | ctcgtgatcactctttactgtaagcgcggtcggaagaagctgctgtacatcttta |
| | | agcaacccttcatgaggcctgtgcagactactcaagaggaggacggctgttcatg |
| | | ccggttcccagaggaggaggaaggcggctgcgaactgcgcgtgaaattcagccgc |
| | | agcgcagatgctccagcctacaagcaggggcagaaccagctctacaacgaactca |
| | | atcttggtcggagagaggagtacgacgtgctggacaagcggagaggacgggaccc |
| | | agaaatgggcgggaagccgcgcagaaagaatccccaagagggcctgtacaacgag |
| | | ctccaaaaggataagatggcagaagcctatagcgagattggtatgaaaggggaac |
| | | gcagaagaggcaaaggccacgacggactgtaccagggactcagcaccgccaccaa |
| | | ggacacctatgacgctcttcacatgcaggccctgccgcctcgg |
| 105974 | 937 | MALPVTALLLPLALLLHAARPeivmtqspatlslspgeratlscrasqdiskyln |
| CAR 9 - | | wyqqkpgqaprlliyhtsrlhsgiparfsgsgsgtdytltisslqpedfavyfcq |
| Full - aa | | qgntlpytfgqgtkleikggggsggggsggggsggggsqvqlqesgpglvkpset |
| | | lsltctvsgvslpdygvswirqppgkglewigviwgsettyynsslksrvtiskd |
| | | nsknqvslklssvtaadtavyycakhyyyggsyamdywgqgtlvtvsstttpapr |
| | | pptpaptiasqplslrpeacrpaaggavhtrgldfacdiyiwaplagtcgvllls |
| | | lvitlyckrgrkkllyifkqpfmrpvqttqeedgcscrfpeeeeggcelrvkfsr |
| | | sadapaykqgqnqlynelnlgrreeydvidkrrgrdpemggkprrknpqeglyne |
| | | lqkdkmaeayseigmkgerrrgkghdglyggistatkdtydalhmqalppr |

CAR 10

| | | |
|---|---|---|
| CAR 10 | 938 | qvqlqesgpglvkpsetlsltctvsgvslpdygvswirqppgkglewigviwgse |
| scFv | | ttyynsslksrvtiskdnsknqvslklssvtaadtavyycakhyyyggsyamdyw |
| domain | | gqgtlvtvssggggsggggsggggsggggseivmtqspatlslspgeratlscra |
| | | sqdiskylnwyqqkpgqaprlliyhtsrlhsgiparfsgsgsgtdytltisslqp |
| | | edfavyfcqqgntlpytfgqgtkleik |
| 100796 | 939 | atggcactgcctgtcactgccctcctgctgcctctggccctccttctgcatgccg |
| CAR 10 - | | ccaggccccaagtccagctgcaagagtcaggacccggactggtgaagccgtctga |
| Soluble | | gactctctcactgacttgtaccgtcagcggcgtgtccctccccgactacggagtg |
| scFV - nt | | tcatggatccgccaacctcccgggaaagggcttgaatggattggtgtcatctggg |
| | | gttctgaaaccacctactacaactcttccctgaagtccagggtgaccatcagcaa |
| | | ggataattccaagaaccaggtcagccttaagctgtcatctgtgaccgctgctgac |
| | | accgccgtgtattactgcgccaagcactactattacggaggaagctacgctatgg |
| | | actattggggacagggcactctcgtgactgtgagcagcggcggtggagggtctgg |
| | | aggtggaggatccggtggtggtgggtcaggcggaggagggagcgagattgtgatg |
| | | actcagtcaccagccaccctttctctttcacccggcgagagagcaaccctgagct |
| | | gtagagccagccaggacatttctaagtacctcaactggtatcagcaaaaaccggg |
| | | gcaggcccctcgcctcctgatctaccatacctcacgccttcactctggtatcccc |
| | | gctcggtttagcggatcaggatctggtaccgactacactctgaccatttccagcc |
| | | tgcagccagaagatttcgcagtgtatttctgccagcagggcaatacccttcctta |
| | | caccttcggtcagggaaccaagctcgaaatcaagcaccatcaccatcatcaccac |
| | | cat |
| 100796 | 940 | MALPVTALLLPLALLLHAARPqvqlqesgpglvkpsetlsltctvsgvslpdygv |
| CAR 10 - | | swirgppgkglewigviwgsettyynsslksrvtiskdnsknqvslklssvtaad |
| Soluble | | tavyycakhyyyggsyamdywgggtlvtvssggggsggggsggggsggggseivm |
| scFv - aa | | tgspatlslspgeratlscrasgdiskylnwyggkpgqaprlliyhtsrlhsgip |
| | | arfsgsgsgtdytltisslgpedfavyfcqqgntlpytfgqgtkleikhhhhhhh |
| | | h |
| 105975 | 941 | atggccctccctgtcaccgccctgctgcttccgctggctcttctgctccacgccg |
| CAR 10 | | ctcggcccgaaattgtgatgacccagtcacccgccactcttagcctttcacccgg |
| Full - nt | | tgagcgcgcaaccctgtcttgcagagcctcccaagacatctcaaaataccttaat |
| | | tggtatcaacagaagcccggacaggctcctcgccttctgatctaccacaccagcc |
| | | ggctccattctggaatccctgccaggttcagcggtagcggatctgggaccgacta |
| | | caccctcactatcagctcactgcagccagaggacttcgctgtctatttctgtcag |
| | | caagggaacaccctgccctacacctttggacagggcaccaagctcgagattaaag |
| | | gtggaggtggcagcggaggaggtgggtccggcggtggaggaagcggaggcggtgg |
| | | gagccaggtccaactccaagaaagcggaccgggtcttgtgaagccatcagaaact |
| | | ctttcactgacttgtactgtgagcggagtgtctctccccgattacggggtgtctt |
| | | ggatcagacagccaccggggaagggtctggaatggattggagtgatttggggctc |
| | | tgagactacttactacaactcatccctcaagtcacgcgtcaccatctcaaaggac |
| | | aactctaagaatcaggtgtcactgaaactgtcatctgtgaccgcagccgacaccg |
| | | ccgtgtactattgcgctaagcattactattatggcgggagctacgcaatggatta |
| | | ctggggacagggtactctggtcaccgtgtccagcaccactaccccagcaccgagg |
| | | ccacccaccccggctcctaccatcgcctcccagcctctgtccctgcgtccggagg |
| | | catgtagacccgcagctggtggggccgtgcatacccggggtcttgacttcgcctg |
| | | cgatatctacatttgggcccctctggctggtacttgcggggtcctgctgctttca |
| | | ctcgtgatcactctttactgtaagcgcggtcggaagaagctgctgtacatcttta |
| | | agcaacccttcatgaggcctgtgcagactactcaagaggaggacggctgttcatg |
| | | ccggttcccagaggaggaggaaggcggctgcgaactgcgcgtgaaattcagccgc |
| | | agcgcagatgctccagcctacaagcaggggcagaaccagctctacaacgaactca |
| | | atcttggtcggagagaggagtacgacgtgctggacaagcggagaggacgggaccc |
| | | agaaatgggcgggaagccgcgcagaaagaatccccaagagggcctgtacaacgag |
| | | ctccaaaaggataagatggcagaagcctatagcgagattggtatgaaaggggaac |
| | | gcagaagaggcaaaggccacgacggactgtaccagggactcagcaccgccaccaa |
| | | ggacacctatgacgctcttcacatgcaggccctgccgcctcgg |
| 105975 | 942 | MALPVTALLLPLALLLHAARPEIVMTQSPATLSLSPGERATLSCRASQDISKYLN |
| CAR 10 | | WYQQKPGQAPRLLIYHTSRLHSGIPARFSGSGSGTDYTLTISSLQPEDFAVYFCQ |
| Full - aa | | QGNTLPYTFGQGTKLEIKGGGGSGGGGSGGGGSGGGGSQVQLQESGPGLVKPSET |
| | | LSLTCTVSGVSLPDYGVSWIRQPPGKGLEWIGVIWGSETTYYNSSLKSRVTISKD |
| | | NSKNQVSLKLSSVTAADTAVYYCAKHYYYGGSYAMDYWGQGTLVTVSSTTTPAPR |
| | | PPTPAPTIASQPLSLRPEACRPAAGGAVHTRGLDFACDIYIWAPLAGTCGVLLLS |
| | | LVITLYCKRGRKKLLYIFKQPFMRPVQTTQEEDGCSCRFPEEEEGGCELRVKFSR |
| | | SADAPAYKQGQNQLYNELNLGRREEYDVLDKRRGRDPEMGGKPRRKNPQEGLYNE |
| | | LQKDKMAEAYSEIGMKGERRRGKGHDGLYQGLSTATKDTYDALHMQALPPR |

CAR 11

| | | |
|---|---|---|
| CAR 11 | 943 | eivmtqspatlslspgeratlscrasgdiskylnwyggkpgqaprlliyhtsrlh |
| scFv | | sgiparfsgsgsgtdytltisslqpedfavyfcqqgntlpytfgqgtkleikggg |
| domain | | gsggggsggggsqvqlqesgpglvkpsetlsltctvsgvslpdygyswirgppgk |
| | | glewigviwgsettyynsslksrvtiskdnsknqvslklssvtaadtavyycakh |
| | | yyyggsyamdywgqgtlvtvss |
| 103101 | 944 | Atggccctccctgtcaccgccctgctgcttccgctggctcttctgctccacgccg |
| CAR 11 - | | ctcggcccgaaattgtgatgacccagtcacccgccactcttagcctttcacccgg |
| Soluble | | tgagcgcgcaaccctgtcttgcagagcctcccaagacatctcaaaataccttaat |
| scFv - nt | | tggtatcaacagaagcccggacaggctcctcgccttctgatctaccacaccagcc |
| | | ggctccattctggaatccctgccaggttcagcggtagcggatctgggaccgacta |
| | | caccctcactatcagctcactgcagccagaggacttcgctgtctatttctgtcag |
| | | caagggaacaccctgccctacacctttggacagggcaccaagctcgagattaaag |
| | | gtggaggtggcagcggaggaggtgggtccggcggtggaggaagccaggtccaact |
| | | ccaagaaagcggaccgggtcttgtgaagccatcagaaactctttcactgacttgt |
| | | actgtgagcggagtgtctctccccgattacggggtgtcttggatcagacagccac |
| | | cggggaagggtctggaatggattggagtgatttggggctctgagactacttacta |
| | | caattcatccctcaagtcacgcgtcaccatctcaaaggacaactctaagaatcag |
| | | gtgtcactgaaactgtcatctgtgaccgcagccgacaccgccgtgtactattgcg |
| | | ctaagcattactattatggcgggagctacgcaatggattactggggacagggtac |
| | | tctggtcaccgtgtccagccaccaccatcatcaccatcaccat |
| 103101 | 945 | MALPVTALLLPLALLLHAARPeivmtqspatlslspgeratlscrasgdiskyln |
| CAR 11 - | | wyggkpgqaprlliyhtsrlhsgiparfsgsgsgtdytltissigpedfavyfcq |
| Soluble | | qgntlpytfgqgtkleikggggsggggsggggsqvqlqesgpglvkpsetlsltc |
| scFv-aa | | tvsgysipdygvswirqppgkglewigviwgsettyynsslksrvtiskdnsknq |
| | | vslklssvtaadtavyycakhyyyggsyamdywgqgtlvtvsshhhhhhhh |
| 105976 | 946 | atggctctgcccgtgaccgcactcctcctgccactggctctgctgcttcacgccg |
| CAR 11 | | ctcgcccacaagtccagcttcaagaatcagggcctggtctggtgaagccatctga |
| Full - nt | | gactctgtccctcacttgcaccgtgagcggagtgtccctcccagactacggagtg |
| | | agctggattagacagcctcccggaaagggactggagtggatcggagtgatttggg |
| | | gtagcgaaaccacttactataactcttccctgaagtcacgggtcaccatttcaaa |
| | | ggataactcaaagaatcaagtgagcctcaagctctcatcagtcaccgccgctgac |
| | | accgccgtgtattactgtgccaagcattactactatggagggtcctacgccatgg |
| | | actactggggccagggaactctggtcactgtgtcatctggtggaggaggtagcgg |
| | | aggaggcgggagcggtggaggtggctccggaggtggcggaagcgaaatcgtgatg |
| | | acccagagccctgcaaccctgtccctttctcccggggaacgggctaccctttctt |
| | | gtcgggcatcacaagatatctcaaaatacctcaattggtatcaacagaagccggg |
| | | acaggcccctaggcttcttatctaccacacctctcgcctgcatagcgggattccc |
| | | gcacgctttagcgggtctggaagcgggaccgactacactctgaccatctcatctc |
| | | tccagcccgaggacttcgccgtctacttctgccagcagggtaacaccctgccgta |
| | | caccttcggccagggcaccaagcttgagatcaaaaccactactcccgctccaagg |
| | | ccacccacccctgccccgaccatcgcctctcagccgctttccctgcgtccggagg |
| | | catgtagacccgcagctggtggggccgtgcatacccggggtcttgacttcgcctg |
| | | cgatatctacatttgggcccctctggctggtacttgcggggtcctgctgctttca |
| | | ctcgtgatcactctttactgtaagcgcggtcggaagaagctgctgtacatcttta |
| | | agcaacccttcatgaggcctgtgcagactactcaagaggaggacggctgttcatg |
| | | ccggttcccagaggaggaggaaggcggctgcgaactgcgcgtgaaattcagccgc |
| | | agcgcagatgctccagcctacaagcaggggcagaaccagctctacaacgaactca |
| | | atcttggtcggagagaggagtacgacgtgctggacaagcggagaggacgggaccc |
| | | agaaatgggcgggaagccgcgcagaaagaatccccaagagggcctgtacaacgag |
| | | ctccaaaaggataagatggcagaagcctatagcgagattggtatgaaaggggaac |
| | | gcagaagaggcaaaggccacgacggactgtaccagggactcagcaccgccaccaa |
| | | ggacacctatgacgctcttcacatgcaggccctgccgcctcgg |
| 105976 | 947 | MALPVTALLLPLALLLHAARPQVQLQESGPGLVKPSETLSLTCTVSGVSLPDYGV |
| CAR 11 | | SWIRQPPGKGLEWIGVIWGSETTYYNSSLKSRVTISKDNSKNQVSLKLSSVTAAD |
| Full - aa | | TAVYYCAKHYYYGGSYAMDYWGQGTLVTVSSGGGGSGGGGSGGGGSGGGGSEIVM |
| | | TQSPATLSLSPGERATLSCRASQDISKYLNWYQQKPGQAPRLLIYHTSRLHSGIP |
| | | ARFSGSGSGTDYTLTISSLQPEDFAVYFCQQGNTLPYTFGQGTKLEIKTTTPAPR |
| | | PPTPAPTIASQPLSLRPEACRPAAGGAVHTRGLDFACDIYIWAPLAGTCGVLLLS |
| | | LVITLYCKRGRKKLLYIFKQPFMRPVQTTQEEDGCSCRFPEEEEGGCELRVKFSR |
| | | SADAPAYKQGQNQLYNELNLGRREEYDVLDKRRGRDPEMGGKPRRKNPQEGLYNE |
| | | LQKDKMAEAYSEIGMKGERRRGKGHDGLYQGLSTATKDTYDALHMQALPPR |

CAR 12

| | | |
|---|---|---|
| CAR 12 | 948 | qvqlqesgpglvkpsetlsltctvsgvslpdygyswirqppgkglewigviwgse |
| scFv | | ttyynsslksrvtiskdnsknqvslklssvtaadtavyycakhyyyggsyamdyw |
| domain | | gqgtlvtvssggggsggggsggggseivmtqspatlslspgeratlscrasqdis |
| | | kylnwyqqkpgqaprlliyhtsrlhsgiparfsgsgsgtdytltisslqpedfav |
| | | yfcqqgntlpytfgqgtkleik |
| 103104 | 949 | atggctctgcccgtgaccgcactcctcctgccactggctctgctgcttcacgccg |
| CAR 12 - | | ctcgcccacaagtccagcttcaagaatcagggcctggtctggtgaagccatctga |
| Soluble | | gactctgtccctcacttgcaccgtgagcggagtgtccctcccagactacggagtg |
| scFv - nt | | agctggattagacagcctcccggaaagggactggagtggatcggagtgatttggg |
| | | gtagcgaaaccacttactataactcttccctgaagtcacgggtcaccatttcaaa |
| | | ggataactcaaagaatcaagtgagcctcaagctctcatcagtcaccgccgctgac |
| | | accgccgtgtattactgtgccaagcattactactatggagggtcctacgccatgg |
| | | actactggggccagggaactctggtcactgtgtcatctggtggaggaggtagcgg |
| | | aggaggcgggagcggtggaggtggctccgaaatcgtgatgacccagagccctgca |
| | | accctgtccctttctcccggggaacgggctaccctttcttgtcgggcatcacaag |
| | | atatctcaaaatacctcaattggtatcaacagaagccgggacaggcccctaggct |
| | | tcttatctaccacacctctcgcctgcatagcgggattcccgcacgctttagcggg |
| | | tctggaagcgggaccgactacactctgaccatctcatctctccagcccgaggact |
| | | tcgccgtctacttctgccagcagggtaacaccctgccgtacaccttcggccaggg |
| | | caccaagcttgagatcaaacatcaccaccatcatcaccatcac |
| 103104 | 950 | MALPVTALLLPLALLLHAARPqvqlqesgpglvkpsetlsltctvsgvslpdygv |
| CAR 12 - | | swirgppgkglewigviwgsettyynsslksrvtiskdnsknqvslklssvtaad |
| Soluble | | tavyycakhyyyggsyamdywgggtlvtvssggggsggggsggggseivmtgspa |
| scFv -aa | | tlslspgeratlscrasgdiskylnwyggkpgqaprlliyhtsrlhsgiparfsg |
| | | sgsgtdytltisslqpedfavyfcqqgntlpytfgqgtkleikhhhhhhhh |
| 105977 | 951 | atggccctccctgtcaccgccctgctgcttccgctggctcttctgctccacgccg |
| CAR 12 - | | ctcggcccgaaattgtgatgacccagtcacccgccactcttagcctttcacccgg |
| Full - nt | | tgagcgcgcaaccctgtcttgcagagcctcccaagacatctcaaaataccttaat |
| | | tggtatcaacagaagcccggacaggctcctcgccttctgatctaccacaccagcc |
| | | ggctccattctggaatccctgccaggttcagcggtagcggatctgggaccgacta |
| | | caccctcactatcagctcactgcagccagaggacttcgctgtctatttctgtcag |
| | | caagggaacaccctgccctacacctttggacagggcaccaagctcgagattaaag |
| | | gtggaggtggcagcggaggaggtgggtccggcggtggaggaagccaggtccaact |
| | | ccaagaaagcggaccgggtcttgtgaagccatcagaaactctttcactgacttgt |
| | | actgtgagcggagtgtctctccccgattacggggtgtcttggatcagacagccac |
| | | cggggaagggtctggaatggattggagtgatttggggctctgagactacttacta |
| | | caactcatccctcaagtcacgcgtcaccatctcaaaggacaactctaagaatcag |
| | | gtgtcactgaaactgtcatctgtgaccgcagccgacaccgccgtgtactattgcg |
| | | ctaagcattactattatggcgggagctacgcaatggattactggggacagggtac |
| | | tctggtcaccgtgtccagcaccactaccccagcaccgaggccacccaccccggct |
| | | cctaccatcgcctcccagcctctgtccctgcgtccggaggcatgtagacccgcag |
| | | ctggtggggccgtgcatacccggggtcttgacttcgcctgcgatatctacatttg |
| | | ggcccctctggctggtacttgcggggtcctgctgctttcactcgtgatcactctt |
| | | tactgtaagcgcggtcggaagaagctgctgtacatctttaagcaacccttcatga |
| | | ggcctgtgcagactactcaagaggaggacggctgttcatgccggttcccagagga |
| | | ggaggaaggcggctgcgaactgcgcgtgaaattcagccgcagcgcagatgctcca |
| | | gcctacaagcaggggcagaaccagctctacaacgaactcaatcttggtcggagag |
| | | aggagtacgacgtgctggacaagcggagaggacgggacccagaaatgggcgggaa |
| | | gccgcgcagaaagaatccccaagagggcctgtacaacgagctccaaaaggataag |
| | | atggcagaagcctatagcgagattggtatgaaaggggaacgcagaagaggcaaag |
| | | gccacgacggactgtaccagggactcagcaccgccaccaaggacacctatgacgc |
| | | tcttcacatgcaggccctgccgcctcgg |
| 105977 | 952 | MALPVTALLLPLALLLHAARPEIVMTQSPATLSLSPGERATLSCRASQDISKYLN |
| CAR 12 - | | WYQQKPGQAPRLLIYHTSRLHSGIPARFSGSGSGTDYTLTISSLQPEDFAVYFCQ |
| Full - aa | | QGNTLPYTFGQGTKLEIKGGGGSGGGGSGGGGSQVQLQESGPGLVKPSETLSLTC |
| | | TVSGVSLPDYGVSWIRQPPGKGLEWIGVIWGSETTYYNSSLKSRVTISKDNSKNQ |
| | | VSLKLSSVTAADTAVYYCAKHYYYGGSYAMDYWGQGTLVTVSSTTTPAPRPPTPA |
| | | PTIASQPLSLRPEACRPAAGGAVHTRGLDFACDIYIWAPLAGTCGVLLLSLVITL |
| | | YCKRGRKKLLYIFKQPFMRPVQTTQEEDGCSCRFPEEEEGGCELRVKFSRSADAP |
| | | AYKQGQNQLYNELNLGRREEYDVLDKRRGRDPEMGGKPRRKNPQEGLYNELQKDK |
| | | [sequence omitted] |

CTL019

| | | |
|---|---|---|
| CTL019 - | 953 | atggccctgcccgtcaccgctctgctgctgccccttgctctgcttcttcatgcag |
| Soluble | | caaggccggacatccagatgacccaaaccacctcatccctctctgcctctcttgg |
| scFv- | | agacagggtgaccatttcttgtcgcgccagccaggacatcagcaagtatctgaac |
| Histag - | | tggtatcagcagaagccggacggaaccgtgaagctcctgatctaccatacctctc |
| nt | | gcctgcatagcggcgtgccctcacgcttctctggaagcggatcaggaaccgatta |
| | | ttctctcactatttcaaatcttgagcaggaagatattgccacctatttctgccag |
| | | cagggtaataccctgccctacaccttcggaggagggaccaagctcgaaatcaccg |
| | | gtggaggaggcagcggcggtggagggtctggtggaggtggttctgaggtgaagct |
| | | gcaagaatcaggccctggacttgtggccccttcacagtccctgagcgtgacttgc |
| | | accgtgtccggagtctccctgcccgactacggagtgtcatggatcagacaacctc |
| | | cacggaaaggactggaatggctcggtgtcatctggggtagcgaaactacttacta |
| | | caattcagccctcaaaagcaggctgactattatcaaggacaacagcaagtcccaa |
| | | gtctttcttaagatgaactcactccagactgacgacaccgcaatctactattgtg |
| | | ctaagcactactactacggaggatcctacgctatggattactggggacaaggtac |
| | | ttccgtcactgtctcttcacaccatcatcaccatcaccatcac |
| CTL019 - | 954 | MALPVTALLLPLALLLHAARPdiqmtqttssisasigdrytiscrasqdiskyln |
| Soluble | | wyggkpdgtvklliyhtsrlhsgvpsrfsgsgsgtdysltisnlegediatyfcg |
| scFv- | | qgntlpytfgqgtkleitggggsggggsggggsevklgesgpglvapsgslsvtc |
| Histag - | | tvsgyslpdygvswirgpprkglewlgviwgsettyynsalksrltiikdnsksq |
| aa | | vfikmnslgtddtaiyycakhyyyggsyamdywgggtsvtvsshhhhhhhh |
| CTL019 | 955 | atggccttaccagtgaccgccttgctcctgccgctggccttgctgctccacgccg |
| Full - nt | | ccaggccggacatccagatgacacagactacatcctccctgtctgcctctctggg |
| | | agacagagtcaccatcagttgcagggcaagtcaggacattagtaaatatttaaat |
| | | tggtatcagcagaaaccagatggaactgttaaactcctgatctaccatacatcaa |
| | | gattacactcaggagtcccatcaaggttcagtggcagtgggtctggaacagatta |
| | | ttctctcaccattagcaacctggagcaagaagatattgccacttacttttgccaa |
| | | cagggtaatacgcttccgtacacgttcggaggggggaccaagctggagatcacag |
| | | gtggcggtggctcgggcggtggtgggtcgggtggcggcggatctgaggtgaaact |
| | | gcaggagtcaggacctggcctggtggcgccctcacagagcctgtccgtcacatgc |
| | | actgtctcaggggtctcattacccgactatggtgtaagctggattcgccagcctc |
| | | cacgaaagggtctggagtggctgggagtaatatggggtagtgaaaccacatacta |
| | | taattcagctctcaaatccagactgaccatcatcaaggacaactccaagagccaa |
| | | gttttcttaaaaatgaacagtctgcaaactgatgacacagccatttactactgtg |
| | | ccaaacattattactacggtggtagctatgctatggactactggggccaaggaac |
| | | ctcagtcaccgtctcctcaaccacgacgccagcgccgcgaccaccaacaccggcg |
| | | cccaccatcgcgtcgcagcccctgtccctgcgcccagaggcgtgccggccagcgg |
| | | cggggggcgcagtgcacacgagggggctggacttcgcctgtgatatctacatctg |
| | | ggcgcccttggccgggacttgtggggtccttctcctgtcactggttatcaccctt |
| | | tactgcaaacggggcagaaagaaactcctgtatatattcaaacaaccatttatga |
| | | gaccagtacaaactactcaagaggaagatggctgtagctgccgatttccagaaga |
| | | agaagaaggaggatgtgaactgagagtgaagttcagcaggagcgcagacgccccc |
| | | gcgtacaagcagggccagaaccagctctataacgagctcaatctaggacgaagag |
| | | aggagtacgatgttttggacaagagacgtggccgggaccctgagatggggggaaa |
| | | gccgagaaggaagaaccctcaggaaggcctgtacaatgaactgcagaaagataag |
| | | atggcggaggcctacagtgagattgggatgaaaggcgagcgccggaggggcaagg |
| | | ggcacgatggcctttaccagggtctcagtacagccaccaaggacacctacgacgc |
| | | ccttcacatgcaggccctgccccctcgc |
| CTL019 | 956 | MALPVTALLLPLALLLHAARPdiqmtqttssisasigdrvtiscrasqdiskyln |
| Full - aa | | wyqqkpdgtvklliyhtsrlhsgvpsrfsgsgsgtdysltisnleqediatyfcq |
| | | qgntlpytfgqgtkleitggggsggggsggggsevklqesgpglvapsqslsvtc |
| | | tvsgvslpdygvswirqpprkglewlgviwgsettyynsalksrltiikdnsksq |
| | | vflkmnslqtddtaiyycakhyyyggsyamdywgqgtsvtvsstttpaprpptpa |
| | | ptiasqplslrpeacrpaaggavhtrgldfacdiyiwaplagtcgvlllsivitl |
| | | yckrgrkkllyifkqpfmrpvqttqeedgcscrfpeeeeggcelrvkfsrsadap |
| | | aykqgqnqlynelnlgrreeydvidkrrgrdpemggkprrknpqeglynelqkdk |
| | | maeayseigmkgerrrgkghdglyggistatkdtydalhmqalppr |
| CTL019 | 957 | diqmtqttsslsaslgdrvtiscrasqdiskylnwyqqkpdgtvklliyhtsrlh |
| scFv | | sgvpsrfsgsgsgtdysltisnleqediatyfcqqgntlpytfgqgtkleitggg |
| domain | | gsggggsggggsevklqesgpglvapsqslsvtctvsgvslpdygvswirqpprk |
| | | glewlgviwgsettyynsalksrltiikdnsksqvflkmnslqtddtaiyycakh |
| | | yyyggsyamdywgqgtsvtvss |
| mCAR 1 | 2020 | QVQLLESGAELVRPGSSVKISCKASGYAFSSYWMNWVKQRPGQGLEWIGQIYPGD |
| scFv | | GDTNYNGKFKGQATLTADKSSSTAYMQLSGLTSEDSAVYSCARKTISSVVDFYFD |
| | | YWGQGTTVTGGGSGGGSGGGSGGGSELVLTQSPKFMSTSVGDRVSVTCKASQNVG |
| | | TNVAWYQQKPGQSPKPLIYSATYRNSGVPDRFTGSGSGTDFTLTITNVQSKDLAD |
| | | YFCQYNRYPYTSFFFTKLEIKRRS |
| mCAR 1 | | QVQLLESGAELVRPGSSVKISCKASGYAFSSYWMNWVKQRPGQGLEWIGQIYPGD |
| Full - aa | | GDTNYNGKFKGQATLTADKSSSTAYMQLSGLTSEDSAVYSCARKTISSVVDFYFD |
| | | YWGQGTTVTGGGSGGGSGGGSGGGSELVLTQSPKFMSTSVGDRVSVTCKASQNVG |
| | | TNVAWYQQKPGQSPKPLIYSATYRNSGVPDRFTGSGSGTDFTLTITNVQSKDLAD |
| | | YFCQYNRYPYTSFFFTKLEIKRRSKIEVMYPPPYLDNEKSNGTIIHVKGKHLCPS |
| | | PLFPGPSKPFWVLVVVGGVLACYSLLVTVAFIIFWVRSKRSRLLHSDYMNMTPRR |
| | | PGPTRKHYQPYAPPRDFAAYRSRVKFSRSADAPAYQQGQNQLYNELNLGRREEYD |
| | | VLDKRRGRDPEMGGKPRRKNPQEGLYNELQKDKMAEAYSEIGMKGERRRGKGHDG |
| | | LYQGLSTATKDTYDALHMQALPPR |
| mCAR 2 | 2021 | DIQMTQTTSSLSASLGDRVTISCRASQDISKYLNWYQQKPDGTVKLLIYHTSRLH |
| scFv | | SGVPSRFSGSGSGTDYSLTISNLEQEDIATYFCQQGNTLPYTFGQGTKLEITGST |
| | | SGSGKPGSGEGSTKGEVKLQESGPGLVAPSQSLSVTCTVSGVSLPDYGVSWIRQP |
| | | PRKGLEWLGVIWGSETTYYNSALKSRLTIIKDNSKSQVFLKMNSLQTDDTAIYYC |
| | | AKHYYYGGSYAMDYWGQGTSVTVSSE |
| mCAR 2 | | DIQMTQTTSSLSASLGDRVTISCRASQDISKYLNWYQQKPDGTVKLLIYHTSRLH |
| CAR - aa | | SGVPSRFSGSGSGTDYSLTISNLEQEDIATYFCQQGNTLPYTFGQGTKLEITGST |
| | | SGSGKPGSGEGSTKGEVKLQESGPGLVAPSQSLSVTCTVSGVSLPDYGVSWIRQP |
| | | PRKGLEWLGVIWGSETTYYNSALKSRLTIIKDNSKSQVFLKMNSLQTDDTAIYYC |
| | | AKHYYYGGSYAMDYWGQGTSVTVSSESKYGPPCPPCPMFWVLVVVGGVLACYSLL |
| | | VTVAFIIFWVKRGRKKLLYIFKQPFMRPVQTTQEEDGCSCRFEEEEGGCELRVKF |
| | | SRSADAPAYQQGQNQLYNELNLGRREEYDVLDKRRGRDPEMGGKPRRKNPQEGLY |
| | | NELQKDKMAEAYSEIGMKGERRRGKGHDGLYQGLSTATKDTYDALHMQALPPRL |
| mCAR 2 | | DIQMTQTT SSLSASLGDR VTISCRASQD ISKYLNWYQQ KPDGTVKLLI |
| Full - aa | | YHTSRLHSGV PSRFSGSGSG TDYSLTISNL EQEDIATYFC QQGNTLPYTF |
| | | GGGTKLEITG STSGSGKPGS GEGSTKGEVK LQESGPGLVA PSQSLSVTCT |
| | | VSGVSLPDYG VSWIRQPPRK GLEWLGVIWG SETTYYNSAL KSRLTIIKDN |
| | | SKSQVFLKMN SLQTDDTAIY YCAKHYYYGG SYAMDYWGQG TSVTVSSESK |
| | | YGPPCPPCPM FWVLVVVGGV LACYSLLVTV |
| | | AFIIFWVKRG RKKLLYIFKQ PFMRPVQTTQ EEDGCSCRFE EEEGGCELRV |
| | | KFSRSADAPA YQQGQNQLYN ELNLGRREEY DVLDKRRGRD PEMGGKPRRK |
| | | NPQEGLYNEL QKDKMAEAYS EIGMKGERRR GKGHDGLYQG LSTATKDTYD |
| | | ALHMQALPPR LEGGGEGRGS LLTCGDVEEN PGPRMLLLVT SLLLCELPHP |
| | | AFLLIPRKVC NGIGIGEFKD SLSINATNIK HFKNCTSISG DLHILPVAFR |
| | | GDSFTHTPPL DPQELDILKT VKEITGFLLI QAWPENRTDL HAFENLEIIR |
| | | GRTKQHGQFS LAVVSLNITS LGLRSLKEIS DGDVIISGNK NLCYANTINW |
| | | KKLFGTSGQK TKIISNRGEN SCKATGQVCH ALCSPEGCWG PEPRDCVSCR |
| | | NVSRGRECVD KCNLLEGEPR EFVENSECIQ CHPECLPQAM NITCTGRGPD |
| | | NCIQCAHYID GPHCVKTCPA GVMGENNTLV WKYADAGHVC HLCHPNCTYG |
| | | CTGPGLEGCP TNGPKIPSIA TGMVGALLLL LVVALGIGLF M |
| mCAR 3 | 2022 | DIQMTQTTSSLSASLGDRVTISCRASQDISKYLNWYQQKPDGTVKLLIYHTSRLH |
| scFv | | SGVPSRFSGSGSGTDYSLTISNLEQEDIATYFCQQGNTLPYTFGGGTKLEITGST |
| | | SGSGKPGSGEGSTKGEVKLQESGPGLVAPSQSLSVTCTVSGVSLPDYGVSWIRQP |
| | | PRKGLEWLGVIWGSETTYYNSALKSRLTIIKDNSKSQVFLKMNSLQTDDTAIYYC |
| | | AKHYYYGGSYAMDYWGQGTSVTVSS |
| mCAR 3 | | DIQMTQTTSSLSASLGDRVTISCRASQDISKYLNWYQQKPDGTVKLLIYHTSRLH |
| Full - aa | | SGVPSRFSGSGSGTDYSLTISNLEQEDIATYFCQQGNTLPYTFGGGTKLEITGST |
| | | SGSGKPGSGEGSTKGEVKLQESGPGLVAPSQSLSVTCTVSGVSLPDYGVSWIRQP |
| | | PRKGLEWLGVIWGSETTYYNSALKSRLTIIKDNSKSQVFLKMNSLQTDDTAIYYC |
| | | AKHYYYGGSYAMDYWGQGTSVTVSSAAAIEVMYPPPYLDNEKSNGTIIHVKGKHL |
| | | CPSPLFPGPSKPFWVLVVVGGVLACYSLLVTVAFIIFWVRSKRSRLLHSDYMNMT |
| | | PRRPGPTRKHYQPYAPPRDFAAYRSRVKFSRSADAPAYQQGQNQLYNELNLGRRE |
| | | EYDVLDKRRGRDPEMGGKPRRKNPQEGLYNELQKDKMAEAYSEIGMKGERRRGKG |
| | | HDGLYQGLSTATKDTYDALHMQALPPR |
| SSJ25-C1 | | QVQLLESGAELVRPGSSVKISCKASGYAFSSYWMNWVKQRPGQGLEWIGQIYPGD |
| VH | | GDTNYNGKFKGQATLTADKSSSTAYMQLSGLTSEDSAVYSCARKTISSVVDFYFD |
| sequence | | YWGQGTTVT |
| SSJ25-C1 | | ELVLTQSPKFMSTSVGDRVSVTCKASQNVGTNVAWYQQKPGQSPKPLIYSATYRN |
| VL | | SGVPDRFTGSGSGTDFTLTITNVQSKDLADYFYFCQYNRYPYTSGGGTKLEIKRR |
| sequence | | S |

[0692] In some embodiments, the CD19 CAR or binding domain includes the amino acid sequence of CTL019, or is encoded by the nucleotide sequence of CTL019 according to Table 3 with or without the leader sequence or the his tag, or a sequence substantially identical thereto (e.g., at least 85%, 90%, 95% or higher identity).

[0693] In some embodiments, the CDRs are defined according to the Kabat numbering scheme, the Chothia numbering scheme, or a combination thereof.

[0694] The sequences of humanized CDR sequences of the scFv domains are shown in Table 4A for the heavy chain variable domains and in Table 4B for the light chain variable domains. “ID” stands for the respective SEQ ID NO for each CDR.

TABLE 4A
Heavy Chain Variable Domain CDRs (according to Kabat)

| | | | SEQ | | SEQ | | SEQ |
|---|---|---|---|---|---|---|---|
| Candidate | FW | HCDR1 | ID | HCDR2 | ID | HCDR3 | ID |
| murine_CART19 | | DYGVS | 958 | VIWGSETTYYNSALKS | 959 | HYYYGGSYAMDY | 960 |
| humanized_CART19 a | VH4 | DYGVS | 958 | VIWGSETTYY [symbol] S [symbol] LKS | 961 | HYYYGGSYAMDY | 960 |
| humanized_CART19 b | VH4 | DYGVS | 958 | VIWGSETTYY [symbol] S [symbol] LKS | 962 | HYYYGGSYAMDY | 960 |
| humanized_CART19 c | VH4 | DYGVS | 958 | VIWGSETTYYNS [symbol] KKS | 963 | HYYYGGSYAMDY | 960 |

TABLE 4B
Light Chain Variable Domain CDRs (according to Kabat)

| | | | SEQ | | SEQ | | SEQ |
|---|---|---|---|---|---|---|---|
| Candidate | FW | LCDR1 | ID | LCDR2 | ID | LCDR3 | ID |
| murine_CART19 | | RASQDISKYLN | 964 | HTSRLHS | 965 | QQGNTLPYT | 966 |
| humanized_CART19 a | VK3 | RASQDISKYLN | 964 | HTSRLHS | 965 | QQGNTLPYT | 966 |
| humanized_CART19 b | VK3 | RASQDISKYLN | 964 | HTSRLHS | 965 | QQGNTLPYT | 966 |
| humanized_CART19 c | VK3 | RASQDISKYLN | 964 | HTSRLHS | 965 | QQGNTLPYT | 966 |

[0695] In one embodiment, the CAR molecule comprises a BCMA CAR molecule described herein, e.g., a BCMA CAR described in US-2016-0046724-A1 or WO2016/014565. In embodiments, the BCMA CAR comprises an amino acid, or has a nucleotide sequence of a CAR molecule, or an antigen binding domain according to US-2016-0046724-A1, or Table 1 or 16, SEQ ID NO: 271 or SEQ ID NO: 273 of WO2016/014565, incorporated herein by reference, or a sequence substantially identical to any of the aforesaid sequences (e.g., at least 85%, 90%, 95% or more identical to any of the aforesaid BCMA CAR sequences). The amino acid and nucleotide sequences encoding the BCMA CAR molecules and antigen binding domains (e.g., including one, two, three VH CDRs; and one, two, three VL CDRs according to Kabat or Chothia), are specified in WO2016/014565.

### BCMA CAR

[0696] In embodiments, the BCMA CAR comprises an anti-BCMA binding domain (e.g., human or humanized anti-BCMA binding domain), a transmembrane domain, and an intracellular signaling domain, and wherein said anti-BCMA binding domain comprises a heavy chain complementary determining region 1 (HC CDR1), a heavy chain complementary determining region 2 (HC CDR2), and a heavy chain complementary determining region 3 (HC CDR3) of any anti-BMCA heavy chain binding domain amino acid sequences listed in Table 5 or 6, or a sequence at least 85%, 90%, 95% or more identical thereto (e.g., having less than 5, 4, 3, 2 or 1 amino acid substitutions, e.g., conservative substitutions).

[0697] In one embodiment, the anti-BCMA binding domain comprises a light chain variable region described herein (e.g., in Table 5 or 6) and/or a heavy chain variable region described herein (e.g., in Table 5 or 6), or a sequence at least 85%, 90%, 95% or more identical thereto.

[0698] In one embodiment, the encoded anti-BCMA binding domain is a scFv comprising a light chain and a heavy chain of an amino acid sequence of Table 5 or 6.

[0699] In an embodiment, the human or humanized anti-BCMA binding domain (e.g., an scFv) comprises: a light chain variable region comprising an amino acid sequence having at least one, two or three modifications (e.g., substitutions, e.g., conservative substitutions) but not more than 30, 20 or 10 modifications (e.g., substitutions, e.g., conservative substitutions) of an amino acid sequence of a light chain variable region provided in Table 5 or 6, or a sequence at least 85%, 90%, 95% or more identical thereto; and/or a heavy chain variable region comprising an amino acid sequence having at least one, two or three modifications (e.g., substitutions, e.g., conservative substitutions) but not more than 30, 20 or 10 modifications (e.g., substitutions, e.g., conservative substitutions) of an amino acid sequence of a heavy chain variable region provided in Table 5 or 6, or a sequence at least 85%, 90%, 95% or more identical thereto.

TABLE 5
Amino Acid and Nucleic Acid Sequences of exemplary anti-BCMA scFv domains
and BCMA CAR molecules

| | | |
|---|---|---|
| | SEQ | |
| Name/ | ID | |
| Description | NO: | Sequence |

139109

| | | |
|---|---|---|
| 139109- aa | 967 | EVQLVESGGGLVQPGGSLRLSCAVSGFALSNHGMSWVRRAPGKGLEWVSGIVY |
| ScFv domain | | SGSTYYAASVKGRFTISRDNSRNTLYLQMNSLRPEDTAIYYCSAHGGESDVWG |
| | | QGTTVTVSSASGGGGSGGRASGGGGSDIQLTQSPSSLSASVGDRVTITCRASQ |
| | | SISSYLNWYQQKPGKAPKLLIYAASSLQSGVPSRFSGSGSGTDFTLTISSLQP |
| | | EDFATYYCQQSYSTPYTFGQGTKVEIK |
| 139109- nt | 968 | GAAGTGCAATTGGTGGAATCAGGGGGAGGACTTGTGCAGCCTGGAGGATCGCT |
| ScFv domain | | GAGACTGTCATGTGCCGTGTCCGGCTTTGCCCTGTCCAACCACGGGATGTCCT |
| | | GGGTCCGCCGCGCGCCTGGAAAGGGCCTCGAATGGGTGTCGGGTATTGTGTAC |
| | | AGCGGTAGCACCTACTATGCCGCATCCGTGAAGGGGAGATTCACCATCAGCCG |
| | | GGACAACTCCAGGAACACTCTGTACCTCCAAATGAATTCGCTGAGGCCAGAGG |
| | | ACACTGCCATCTACTACTGCTCCGCGCATGGCGGAGAGTCCGACGTCTGGGGA |
| | | CAGGGGACCACCGTGACCGTGTCTAGCGCGTCCGGCGGAGGCGGCAGCGGGGG |
| | | TCGGGCATCAGGGGGCGGCGGATCGGACATCCAGCTCACCCAGTCCCCGAGCT |
| | | CGCTGTCCGCCTCCGTGGGAGATCGGGTCACCATCACGTGCCGCGCCAGCCAG |
| | | TCGATTTCCTCCTACCTGAACTGGTACCAACAGAAGCCCGGAAAAGCCCCGAA |
| | | GCTTCTCATCTACGCCGCCTCGAGCCTGCAGTCAGGAGTGCCCTCACGGTTCT |
| | | CCGGCTCCGGTTCCGGTACTGATTTCACCCTGACCATTTCCTCCCTGCAACCG |
| | | GAGGACTTCGCTACTTACTACTGCCAGCAGTCGTACTCCACCCCCTACACTTT |
| | | CGGACAAGGCACCAAGGTCGAAATCAAG |
| 139109- aa | 969 | EVQLVESGGGLVQPGGSLRLSCAVSGFALSNHGMSWVRRAPGKGLEWVSGIVY |
| VH | | SGSTYYAASVKGRFTISRDNSRNTLYLQMNSLRPEDTAIYYCSAHGGESDVWG |
| | | QGTTVTVSS |
| 139109- aa | 970 | DIQLTQSPSSLSASVGDRVTITCRASQSISSYLNWYQQKPGKAPKLLIYAASS |
| VL | | LQSGVPSRFSGSGSGTDFTLTISSLQPEDFATYYCQQSYSTPYTFGQGTKVEI |
| | | K |
| 139109- aa | 971 | MALPVTALLLPLALLLHAARPEVQLVESGGGLVQPGGSLRLSCAVSGFALSNH |
| Full CAR | | GMSWVRRAPGKGLEWVSGIVYSGSTYYAASVKGRFTISRDNSRNTLYLQMNSL |
| | | RPEDTAIYYCSAHGGESDVWGQGTTVTVSSASGGGGSGGRASGGGGSDIQLTQ |
| | | SPSSLSASVGDRVTITCRASQSISSYLNWYQQKPGKAPKLLIYAASSLQSGVP |
| | | SRFSGSGSGTDFTLTISSLQPEDFATYYCQQSYSTPYTFGQGTKVEIKTTTPA |
| | | PRPPTPAPTIASQPLSLRPEACRPAAGGAVHTRGLDFACDIYIWAPLAGTCGV |
| | | LLLSLVITLYCKRGRKKLLYIFKQPFMRPVQTTQEEDGCSCRFPEEEEGGCEL |
| | | RVKFSRSADAPAYKQGQNQLYNELNLGRREEYDVLDKRRGRDPEMGGKPRRKN |
| | | PQEGLYNELQKDKMAEAYSEIGMKGERRRGKGHDGLYQGLSTATKDTYDALHM |
| | | QALPPR |
| 139109- nt | 972 | ATGGCCCTCCCTGTCACCGCCCTGCTGCTTCCGCTGGCTCTTCTGCTCCACGC |
| Full CAR | | CGCTCGGCCCGAAGTGCAATTGGTGGAATCAGGGGGAGGACTTGTGCAGCCTG |
| | | GAGGATCGCTGAGACTGTCATGTGCCGTGTCCGGCTTTGCCCTGTCCAACCAC |
| | | GGGATGTCCTGGGTCCGCCGCGCGCCTGGAAAGGGCCTCGAATGGGTGTCGGG |
| | | TATTGTGTACAGCGGTAGCACCTACTATGCCGCATCCGTGAAGGGGAGATTCA |
| | | CCATCAGCCGGGACAACTCCAGGAACACTCTGTACCTCCAAATGAATTCGCTG |
| | | AGGCCAGAGGACACTGCCATCTACTACTGCTCCGCGCATGGCGGAGAGTCCGA |
| | | CGTCTGGGGACAGGGGACCACCGTGACCGTGTCTAGCGCGTCCGGCGGAGGCG |
| | | GCAGCGGGGGTCGGGCATCAGGGGGCGGCGGATCGGACATCCAGCTCACCCAG |
| | | TCCCCGAGCTCGCTGTCCGCCTCCGTGGGAGATCGGGTCACCATCACGTGCCG |
| | | CGCCAGCCAGTCGATTTCCTCCTACCTGAACTGGTACCAACAGAAGCCCGGAA |
| | | AAGCCCCGAAGCTTCTCATCTACGCCGCCTCGAGCCTGCAGTCAGGAGTGCCC |
| | | TCACGGTTCTCCGGCTCCGGTTCCGGTACTGATTTCACCCTGACCATTTCCTC |
| | | CCTGCAACCGGAGGACTTCGCTACTTACTACTGCCAGCAGTCGTACTCCACCC |
| | | CCTACACTTTCGGACAAGGCACCAAGGTCGAAATCAAGACCACTACCCCAGCA |
| | | CCGAGGCCACCCACCCCGGCTCCTACCATCGCCTCCCAGCCTCTGTCCCTGCG |
| | | TCCGGAGGCATGTAGACCCGCAGCTGGTGGGGCCGTGCATACCCGGGGTCTTG |
| | | ACTTCGCCTGCGATATCTACATTTGGGCCCCTCTGGCTGGTACTTGCGGGGTC |
| | | CTGCTGCTTTCACTCGTGATCACTCTTTACTGTAAGCGCGGTCGGAAGAAGCT |
| | | GCTGTACATCTTTAAGCAACCCTTCATGAGGCCTGTGCAGACTACTCAAGAGG |
| | | AGGACGGCTGTTCATGCCGGTTCCCAGAGGAGGAGGAAGGCGGCTGCGAACTG |
| | | CGCGTGAAATTCAGCCGCAGCGCAGATGCTCCAGCCTACAAGCAGGGGCAGAA |
| | | CCAGCTCTACAACGAACTCAATCTTGGTCGGAGAGAGGAGTACGACGTGCTGG |
| | | ACAAGCGGAGAGGACGGGACCCAGAAATGGGCGGGAAGCCGCGCAGAAAGAAT |
| | | CCCCAAGAGGGCCTGTACAACGAGCTCCAAAAGGATAAGATGGCAGAAGCCTA |
| | | TAGCGAGATTGGTATGAAAGGGGAACGCAGAAGAGGCAAAGGCCACGACGGAC |
| | | TGTACCAGGGACTCAGCACCGCCACCAAGGACACCTATGACGCTCTTCACATG |
| | | CAGGCCCTGCCGCCTCGG |

139103

| | | |
|---|---|---|
| 139103- aa | 973 | QVQLVESGGGLVQPGRSLRLSCAASGFTFSNYAMSWVRQAPGKGLGWVSGISR |
| ScFv domain | | SGENTYYADSVKGRFTISRDNSKNTLYLQMNSLRDEDTAVYYCARSPAHYYGG |
| | | MDVWGQGTTVTVSSASGGGGSGGRASGGGGSDIVLTQSPGTLSLSPGERATLS |
| | | CRASQSISSSFLAWYQQKPGQAPRLLIYGASRRATGIPDRFSGSGSGTDFTLT |
| | | ISRLEPEDSAVYYCQQYHSSPSWTFGQGTKLEIK |
| 139103- nt | 974 | CAAGTGCAACTCGTGGAATCTGGTGGAGGACTCGTGCAACCCGGAAGATCGCT |
| ScFv domain | | TAGACTGTCGTGTGCCGCCAGCGGGTTCACTTTCTCGAACTACGCGATGTCCT |
| | | GGGTCCGCCAGGCACCCGGAAAGGGACTCGGTTGGGTGTCCGGCATTTCCCGG |
| | | TCCGGCGAAAATACCTACTACGCCGACTCCGTGAAGGGCCGCTTCACCATCTC |
| | | AAGGGACAACAGCAAAAACACCCTGTACTTGCAAATGAACTCCCTGCGGGATG |
| | | AAGATACAGCCGTGTACTATTGCGCCCGGTCGCCTGCCCATTACTACGGCGGA |
| | | ATGGACGTCTGGGGACAGGGAACCACTGTGACTGTCAGCAGCGCGTCGGGTGG |
| | | CGGCGGCTCAGGGGGTCGGGCCTCCGGGGGGGGAGGGTCCGACATCGTGCTGA |
| | | CCCAGTCCCCGGGAACCCTGAGCCTGAGCCCGGGAGAGCGCGCGACCCTGTCA |
| | | TGCCGGGCATCCCAGAGCATTAGCTCCTCCTTTCTCGCCTGGTATCAGCAGAA |
| | | GCCCGGACAGGCCCCGAGGCTGCTGATCTACGGCGCTAGCAGAAGGGCTACCG |
| | | GAATCCCAGACCGGTTCTCCGGCTCCGGTTCCGGGACCGATTTCACCCTTACT |
| | | ATCTCGCGCCTGGAACCTGAGGACTCCGCCGTCTACTACTGCCAGCAGTACCA |
| | | CTCATCCCCGTCGTGGACGTTCGGACAGGGCACCAAGCTGGAGATTAAG |
| 139103- aa | 975 | QVQLVESGGGLVQPGRSLRLSCAASGFTFSNYAMSWVRQAPGKGLGWVSGISR |
| VH | | SGENTYYADSVKGRFTISRDNSKNTLYLQMNSLRDEDTAVYYCARSPAHYYGG |
| | | MDVWGQGTTVTVSS |
| 139103- aa | 976 | DIVLTQSPGTLSLSPGERATLSCRASQSISSSFLAWYQQKPGQAPRLLIYGAS |
| VL | | RRATGIPDRFSGSGSGTDFTLTISRLEPEDSAVYYCQQYHSSPSWTFGQGTKL |
| | | EIK |
| 139103- aa | 977 | MALPVTALLLPLALLLHAARPQVQLVESGGGLVQPGRSLRLSCAASGFTFSNY |
| Full CAR | | AMSWVRQAPGKGLGWVSGISRSGENTYYADSVKGRFTISRDNSKNTLYLQMNS |
| | | LRDEDTAVYYCARSPAHYYGGMDVWGQGTTVTVSSASGGGGSGGRASGGGGSD |
| | | IVLTQSPGTLSLSPGERATLSCRASQSISSSFLAWYQQKPGQAPRLLIYGASR |
| | | RATGIPDRFSGSGSGTDFTLTISRLEPEDSAVYYCQQYHSSPSWTFGQGTKLE |
| | | IKTTTPAPRPPTPAPTIASQPLSLRPEACRPAAGGAVHTRGLDFACDIYIWAP |
| | | LAGTCGVLLLSLVITLYCKRGRKKLLYIFKQPFMRPVQTTQEEDGCSCRFPEE |
| | | EEGGCELRVKFSRSADAPAYKQGQNQLYNELNLGRREEYDVLDKRRGRDPEMG |
| | | GKPRRKNPQEGLYNELQKDKMAEAYSEIGMKGERRRGKGHDGLYQGLSTATKD |
| | | TYDALHMQALPPR |
| 139103- nt | 978 | ATGGCCCTCCCTGTCACCGCCCTGCTGCTTCCGCTGGCTCTTCTGCTCCACGC |
| Full CAR | | CGCTCGGCCCCAAGTGCAACTCGTGGAATCTGGTGGAGGACTCGTGCAACCCG |
| | | GAAGATCGCTTAGACTGTCGTGTGCCGCCAGCGGGTTCACTTTCTCGAACTAC |
| | | GCGATGTCCTGGGTCCGCCAGGCACCCGGAAAGGGACTCGGTTGGGTGTCCGG |
| | | CATTTCCCGGTCCGGCGAAAATACCTACTACGCCGACTCCGTGAAGGGCCGCT |
| | | TCACCATCTCAAGGGACAACAGCAAAAACACCCTGTACTTGCAAATGAACTCC |
| | | CTGCGGGATGAAGATACAGCCGTGTACTATTGCGCCCGGTCGCCTGCCCATTA |
| | | CTACGGCGGAATGGACGTCTGGGGACAGGGAACCACTGTGACTGTCAGCAGCG |
| | | CGTCGGGTGGCGGCGGCTCAGGGGGTCGGGCCTCCGGGGGGGGAGGGTCCGAC |
| | | ATCGTGCTGACCCAGTCCCCGGGAACCCTGAGCCTGAGCCCGGGAGAGCGCGC |
| | | GACCCTGTCATGCCGGGCATCCCAGAGCATTAGCTCCTCCTTTCTCGCCTGGT |
| | | ATCAGCAGAAGCCCGGACAGGCCCCGAGGCTGCTGATCTACGGCGCTAGCAGA |
| | | AGGGCTACCGGAATCCCAGACCGGTTCTCCGGCTCCGGTTCCGGGACCGATTT |
| | | CACCCTTACTATCTCGCGCCTGGAACCTGAGGACTCCGCCGTCTACTACTGCC |
| | | AGCAGTACCACTCATCCCCGTCGTGGACGTTCGGACAGGGCACCAAGCTGGAG |
| | | ATTAAGACCACTACCCCAGCACCGAGGCCACCCACCCCGGCTCCTACCATCGC |
| | | CTCCCAGCCTCTGTCCCTGCGTCCGGAGGCATGTAGACCCGCAGCTGGTGGGG |
| | | CCGTGCATACCCGGGGTCTTGACTTCGCCTGCGATATCTACATTTGGGCCCCT |
| | | CTGGCTGGTACTTGCGGGGTCCTGCTGCTTTCACTCGTGATCACTCTTTACTG |
| | | TAAGCGCGGTCGGAAGAAGCTGCTGTACATCTTTAAGCAACCCTTCATGAGGC |
| | | CTGTGCAGACTACTCAAGAGGAGGACGGCTGTTCATGCCGGTTCCCAGAGGAG |
| | | GAGGAAGGCGGCTGCGAACTGCGCGTGAAATTCAGCCGCAGCGCAGATGCTCC |
| | | AGCCTACAAGCAGGGGCAGAACCAGCTCTACAACGAACTCAATCTTGGTCGGA |
| | | GAGAGGAGTACGACGTGCTGGACAAGCGGAGAGGACGGGACCCAGAAATGGGC |
| | | GGGAAGCCGCGCAGAAAGAATCCCCAAGAGGGCCTGTACAACGAGCTCCAAAA |
| | | GGATAAGATGGCAGAAGCCTATAGCGAGATTGGTATGAAAGGGGAACGCAGAA |
| | | GAGGCAAAGGCCACGACGGACTGTACCAGGGACTCAGCACCGCCACCAAGGAC |
| | | ACCTATGACGCTCTTCACATGCAGGCCCTGCCGCCTCGG |

139105

| | | |
|---|---|---|
| 139105- aa | 979 | QVQLVESGGGLVQPGRSLRLSCAASGFTFDDYAMHWVRQAPGKGLEWVSGISW |
| ScFv domain | | NSGSIGYADSVKGRFTISRDNAKNSLYLQMNSLRAEDTALYYCSVHSFLAYWG |
| | | QGTLVTVSSASGGGGSGGRASGGGGSDIVMTQTPLSLPVTPGEPASISCRSSQ |
| | | SLLHSNGYNYLDWYLQKPGQSPQLLIYLGSNRASGVPDRFSGSGSGTDFTLKI |
| | | SRVEAEDVGVYYCMQALQTPYTFGQGTKVE1K |
| 139105- nt | 980 | CAAGTGCAACTCGTCGAATCCGGTGGAGGTCTGGTCCAACCTGGTAGAAGCCT |
| ScFv domain | | GAGACTGTCGTGTGCGGCCAGCGGATTCACCTTTGATGACTATGCTATGCACT |
| | | GGGTGCGGCAGGCCCCAGGAAAGGGCCTGGAATGGGTGTCGGGAATTAGCTGG |
| | | AACTCCGGGTCCATTGGCTACGCCGACTCCGTGAAGGGCCGCTTCACCATCTC |
| | | CCGCGACAACGCAAAGAACTCCCTGTACTTGCAAATGAACTCGCTCAGGGCTG |
| | | AGGATACCGCGCTGTACTACTGCTCCGTGCATTCCTTCCTGGCCTACTGGGGA |
| | | CAGGGAACTCTGGTCACCGTGTCGAGCGCCTCCGGCGGCGGGGGCTCGGGTGG |
| | | ACGGGCCTCGGGCGGAGGGGGGTCCGACATCGTGATGACCCAGACCCCGCTGA |
| | | GCTTGCCCGTGACTCCCGGAGAGCCTGCATCCATCTCCTGCCGGTCATCCCAG |
| | | TCCCTTCTCCACTCCAACGGATACAACTACCTCGACTGGTACCTCCAGAAGCC |
| | | GGGACAGAGCCCTCAGCTTCTGATCTACCTGGGGTCAAATAGAGCCTCAGGAG |
| | | TGCCGGATCGGTTCAGCGGATCTGGTTCGGGAACTGATTTCACTCTGAAGATT |
| | | TCCCGCGTGGAAGCCGAGGACGTGGGCGTCTACTACTGTATGCAGGCGCTGCA |
| | | GACCCCCTATACCTTCGGCCAAGGGACGAAAGTGGAGATCAAG |
| 139105- aa | 981 | QVQLVESGGGLVQPGRSLRLSCAASGFTFDDYAMHWVRQAPGKGLEWVSGISW |
| VH | | NSGSIGYADSVKGRFTISRDNAKNSLYLQMNSLRAEDTALYYCSVHSFLAYWG |
| | | QGTLVTVSS |
| 139105- aa | 982 | DIVMTQTPLSLPVTPGEPASISCRSSQSLLHSNGYNYLDWYLQKPGQSPQLLI |
| VL | | YLGSNRASGVPDRFSGSGSGTDFTLKISRVEAEDVGVYYCMQALQTPYTFGQG |
| | | TKVEIK |
| 139105- aa | 983 | MALPVTALLLPLALLLHAARPQVQLVESGGGLVQPGRSLRLSCAASGFTFDDY |
| Full CAR | | AMHWVRQAPGKGLEWVSGISWNSGSIGYADSVKGRFTISRDNAKNSLYLQMNS |
| | | LRAEDTALYYCSVHSFLAYWGQGTLVTVSSASGGGGSGGRASGGGGSDIVMTQ |
| | | TPLSLPVTPGEPASISCRSSQSLLHSNGYNYLDWYLQKPGQSPQLLIYLGSNR |
| | | ASGVPDRFSGSGSGTDFTLKISRVEAEDVGVYYCMQALQTPYTFGQGTKVEIK |
| | | TTTPAPRPPTPAPTIASQPLSLRPEACRPAAGGAVHTRGLDFACDIYIWAPLA |
| | | GTCGVLLLSLVITLYCKRGRKKLLYIFKQPFMRPVQTTQEEDGCSCRFPEEEE |
| | | GGCELRVKFSRSADAPAYKQGQNQLYNELNLGRREEYDVLDKRRGRDPEMGGK |
| | | PRRKNPQEGLYNELQKDKMAEAYSEIGMKGERRRGKGHDGLYQGLSTATKDTY |
| | | DALHMQALPPR |
| 139105- nt | 984 | ATGGCCCTCCCTGTCACCGCCCTGCTGCTTCCGCTGGCTCTTCTGCTCCACGC |
| Full CAR | | CGCTCGGCCCCAAGTGCAACTCGTCGAATCCGGTGGAGGTCTGGTCCAACCTG |
| | | GTAGAAGCCTGAGACTGTCGTGTGCGGCCAGCGGATTCACCTTTGATGACTAT |
| | | GCTATGCACTGGGTGCGGCAGGCCCCAGGAAAGGGCCTGGAATGGGTGTCGGG |
| | | AATTAGCTGGAACTCCGGGTCCATTGGCTACGCCGACTCCGTGAAGGGCCGCT |
| | | TCACCATCTCCCGCGACAACGCAAAGAACTCCCTGTACTTGCAAATGAACTCG |
| | | CTCAGGGCTGAGGATACCGCGCTGTACTACTGCTCCGTGCATTCCTTCCTGGC |
| | | CTACTGGGGACAGGGAACTCTGGTCACCGTGTCGAGCGCCTCCGGCGGCGGGG |
| | | GCTCGGGTGGACGGGCCTCGGGCGGAGGGGGGTCCGACATCGTGATGACCCAG |
| | | ACCCCGCTGAGCTTGCCCGTGACTCCCGGAGAGCCTGCATCCATCTCCTGCCG |
| | | GTCATCCCAGTCCCTTCTCCACTCCAACGGATACAACTACCTCGACTGGTACC |
| | | TCCAGAAGCCGGGACAGAGCCCTCAGCTTCTGATCTACCTGGGGTCAAATAGA |
| | | GCCTCAGGAGTGCCGGATCGGTTCAGCGGATCTGGTTCGGGAACTGATTTCAC |
| | | TCTGAAGATTTCCCGCGTGGAAGCCGAGGACGTGGGCGTCTACTACTGTATGC |
| | | AGGCGCTGCAGACCCCCTATACCTTCGGCCAAGGGACGAAAGTGGAGATCAAG |
| | | ACCACTACCCCAGCACCGAGGCCACCCACCCCGGCTCCTACCATCGCCTCCCA |
| | | GCCTCTGTCCCTGCGTCCGGAGGCATGTAGACCCGCAGCTGGTGGGGCCGTGC |
| | | ATACCCGGGGTCTTGACTTCGCCTGCGATATCTACATTTGGGCCCCTCTGGCT |
| | | GGTACTTGCGGGGTCCTGCTGCTTTCACTCGTGATCACTCTTTACTGTAAGCG |
| | | CGGTCGGAAGAAGCTGCTGTACATCTTTAAGCAACCCTTCATGAGGCCTGTGC |
| | | AGACTACTCAAGAGGAGGACGGCTGTTCATGCCGGTTCCCAGAGGAGGAGGAA |
| | | GGCGGCTGCGAACTGCGCGTGAAATTCAGCCGCAGCGCAGATGCTCCAGCCTA |
| | | CAAGCAGGGGCAGAACCAGCTCTACAACGAACTCAATCTTGGTCGGAGAGAGG |
| | | AGTACGACGTGCTGGACAAGCGGAGAGGACGGGACCCAGAAATGGGCGGGAAG |
| | | CCGCGCAGAAAGAATCCCCAAGAGGGCCTGTACAACGAGCTCCAAAAGGATAA |
| | | GATGGCAGAAGCCTATAGCGAGATTGGTATGAAAGGGGAACGCAGAAGAGGCA |
| | | AAGGCCACGACGGACTGTACCAGGGACTCAGCACCGCCACCAAGGACACCTAT |
| | | GACGCTCTTCACATGCAGGCCCTGCCGCCTCGG |

139111

| | | |
|---|---|---|
| 139111- aa | 985 | EVQLLESGGGLVQPGGSLRLSCAVSGFALSNHGMSWVRRAPGKGLEWVSGIVY |
| ScFv domain | | SGSTYYAASVKGRFTISRDNSRNTLYLQMNSLRPEDTAIYYCSAHGGESDVWG |
| | | QGTTVTVSSASGGGGSGGRASGGGGSDIVMTQTPLSLSVTPGQPASISCKSSQ |
| | | SLLRNDGKTPLYWYLQKAGQPPQLLIYEVSNRFSGVPDRFSGSGSGTDFTLKI |
| | | SRVEAEDVGAYYCMQNIQFPSFGGGTKLEIK |
| 139111- nt | 986 | GAAGTGCAATTGTTGGAATCTGGAGGAGGACTTGTGCAGCCTGGAGGATCACT |
| ScFv domain | | GAGACTTTCGTGTGCGGTGTCAGGCTTCGCCCTGAGCAACCACGGCATGAGCT |
| | | GGGTGCGGAGAGCCCCGGGGAAGGGTCTGGAATGGGTGTCCGGGATCGTCTAC |
| | | TCCGGTTCAACTTACTACGCCGCAAGCGTGAAGGGTCGCTTCACCATTTCCCG |
| | | CGATAACTCCCGGAACACCCTGTACCTCCAAATGAACTCCCTGCGGCCCGAGG |
| | | ACACCGCCATCTACTACTGTTCCGCGCATGGAGGAGAGTCCGATGTCTGGGGA |
| | | CAGGGCACTACCGTGACCGTGTCGAGCGCCTCGGGGGGAGGAGGCTCCGGCGG |
| | | TCGCGCCTCCGGGGGGGGTGGCAGCGACATTGTGATGACGCAGACTCCACTCT |
| | | CGCTGTCCGTGACCCCGGGACAGCCCGCGTCCATCTCGTGCAAGAGCTCCCAG |
| | | AGCCTGCTGAGGAACGACGGAAAGACTCCTCTGTATTGGTACCTCCAGAAGGC |
| | | TGGACAGCCCCCGCAACTGCTCATCTACGAAGTGTCAAATCGCTTCTCCGGGG |
| | | TGCCGGATCGGTTTTCCGGCTCGGGATCGGGCACCGACTTCACCCTGAAAATC |
| | | TCCAGGGTCGAGGCCGAGGACGTGGGAGCCTACTACTGCATGCAAAACATCCA |
| | | GTTCCCTTCCTTCGGCGGCGGCACAAAGCTGGAGATTAAG |
| 139111- aa | 987 | EVQLLESGGGLVQPGGSLRLSCAVSGFALSNHGMSWVRRAPGKGLEWVSGIVY |
| VH | | SGSTYYAASVKGRFTISRDNSRNTLYLQMNSLRPEDTAIYYCSAHGGESDVWG |
| | | QGTTVTVSS |
| 139111- aa | 988 | DIVMTQTPLSLSVTPGQPASISCKSSQSLLRNDGKTPLYWYLQKAGQPPQLLI |
| VL | | YEVSNRFSGVPDRFSGSGSGTDFTLKISRVEAEDVGAYYCMQNIQFPSFGGGT |
| | | KLEIK |
| 139111- aa | 989 | MALPVTALLLPLALLLHAARPEVQLLESGGGLVQPGGSLRLSCAVSGFALSNH |
| Full CAR | | GMSWVRRAPGKGLEWVSGIVYSGSTYYAASVKGRFTISRDNSRNTLYLQMNSL |
| | | RPEDTAIYYCSAHGGESDVWGQGTTVTVSSASGGGGSGGRASGGGGSDIVMTQ |
| | | TPLSLSVTPGQPASISCKSSQSLLRNDGKTPLYWYLQKAGQPPQLLIYEVSNR |
| | | FSGVPDRFSGSGSGTDFTLKISRVEAEDVGAYYCMQNIQFPSFGGGTKLEIKT |
| | | TTPAPRPPTPAPTIASQPLSLRPEACRPAAGGAVHTRGLDFACDIYIWAPLAG |
| | | TCGVLLLSLVITLYCKRGRKKLLYIFKQPFMRPVQTTQEEDGCSCRFPEEEEG |
| | | GCELRVKFSRSADAPAYKQGQNQLYNELNLGRREEYDVLDKRRGRDPEMGGKP |
| | | RRKNPQEGLYNELQKDKMAEAYSEIGMKGERRRGKGHDGLYQGLSTATKDTYD |
| | | ALHMQALPPR |
| 139111- nt | 990 | ATGGCCCTCCCTGTCACCGCCCTGCTGCTTCCGCTGGCTCTTCTGCTCCACGC |
| Full CAR | | CGCTCGGCCCGAAGTGCAATTGTTGGAATCTGGAGGAGGACTTGTGCAGCCTG |
| | | GAGGATCACTGAGACTTTCGTGTGCGGTGTCAGGCTTCGCCCTGAGCAACCAC |
| | | GGCATGAGCTGGGTGCGGAGAGCCCCGGGGAAGGGTCTGGAATGGGTGTCCGG |
| | | GATCGTCTACTCCGGTTCAACTTACTACGCCGCAAGCGTGAAGGGTCGCTTCA |
| | | CCATTTCCCGCGATAACTCCCGGAACACCCTGTACCTCCAAATGAACTCCCTG |
| | | CGGCCCGAGGACACCGCCATCTACTACTGTTCCGCGCATGGAGGAGAGTCCGA |
| | | TGTCTGGGGACAGGGCACTACCGTGACCGTGTCGAGCGCCTCGGGGGGAGGAG |
| | | GCTCCGGCGGTCGCGCCTCCGGGGGGGGTGGCAGCGACATTGTGATGACGCAG |
| | | ACTCCACTCTCGCTGTCCGTGACCCCGGGACAGCCCGCGTCCATCTCGTGCAA |
| | | GAGCTCCCAGAGCCTGCTGAGGAACGACGGAAAGACTCCTCTGTATTGGTACC |
| | | TCCAGAAGGCTGGACAGCCCCCGCAACTGCTCATCTACGAAGTGTCAAATCGC |
| | | TTCTCCGGGGTGCCGGATCGGTTTTCCGGCTCGGGATCGGGCACCGACTTCAC |
| | | CCTGAAAATCTCCAGGGTCGAGGCCGAGGACGTGGGAGCCTACTACTGCATGC |
| | | AAAACATCCAGTTCCCTTCCTTCGGCGGCGGCACAAAGCTGGAGATTAAGACC |
| | | ACTACCCCAGCACCGAGGCCACCCACCCCGGCTCCTACCATCGCCTCCCAGCC |
| | | TCTGTCCCTGCGTCCGGAGGCATGTAGACCCGCAGCTGGTGGGGCCGTGCATA |
| | | CCCGGGGTCTTGACTTCGCCTGCGATATCTACATTTGGGCCCCTCTGGCTGGT |
| | | ACTTGCGGGGTCCTGCTGCTTTCACTCGTGATCACTCTTTACTGTAAGCGCGG |
| | | TCGGAAGAAGCTGCTGTACATCTTTAAGCAACCCTTCATGAGGCCTGTGCAGA |
| | | CTACTCAAGAGGAGGACGGCTGTTCATGCCGGTTCCCAGAGGAGGAGGAAGGC |
| | | GGCTGCGAACTGCGCGTGAAATTCAGCCGCAGCGCAGATGCTCCAGCCTACAA |
| | | GCAGGGGCAGAACCAGCTCTACAACGAACTCAATCTTGGTCGGAGAGAGGAGT |
| | | ACGACGTGCTGGACAAGCGGAGAGGACGGGACCCAGAAATGGGCGGGAAGCCG |
| | | CGCAGAAAGAATCCCCAAGAGGGCCTGTACAACGAGCTCCAAAAGGATAAGAT |
| | | GGCAGAAGCCTATAGCGAGATTGGTATGAAAGGGGAACGCAGAAGAGGCAAAG |
| | | GCCACGACGGACTGTACCAGGGACTCAGCACCGCCACCAAGGACACCTATGAC |
| | | GCTCTTCACATGCAGGCCCTGCCGCCTCGG |

139100

| | | |
|---|---|---|
| 139100- aa | 991 | QVQLVQSGAEVRKTGASVKVSCKASGYIFDNFGINWVRQAPGQGLEWMGWINP |
| ScFv domain | | KNNNTNYAQKFQGRVTITADESTNTAYMEVSSLRSEDTAVYYCARGPYYYQSY |
| | | MDVWGQGTMVTVSSASGGGGSGGRASGGGGSDIVMTQTPLSLPVTPGEPASIS |
| | | CRSSQSLLHSNGYNYLNWYLQKPGQSPQLLIYLGSKRASGVPDRFSGSGSGTD |
| | | FTLHITRVGAEDVGVYYCMQALQTPYTFGQGTKLEIK |
| 139100- nt | 992 | CAAGTCCAACTCGTCCAGTCCGGCGCAGAAGTCAGAAAAACCGGTGCTAGCGT |
| ScFv domain | | GAAAGTGTCCTGCAAGGCCTCCGGCTACATTTTCGATAACTTCGGAATCAACT |
| | | GGGTCAGACAGGCCCCGGGCCAGGGGCTGGAATGGATGGGATGGATCAACCCC |
| | | AAGAACAACAACACCAACTACGCACAGAAGTTCCAGGGCCGCGTGACTATCAC |
| | | CGCCGATGAATCGACCAATACCGCCTACATGGAGGTGTCCTCCCTGCGGTCGG |
| | | AGGACACTGCCGTGTATTACTGCGCGAGGGGCCCATACTACTACCAAAGCTAC |
| | | ATGGACGTCTGGGGACAGGGAACCATGGTGACCGTGTCATCCGCCTCCGGTGG |
| | | TGGAGGCTCCGGGGGGCGGGCTTCAGGAGGCGGAGGAAGCGATATTGTGATGA |
| | | CCCAGACTCCGCTTAGCCTGCCCGTGACTCCTGGAGAACCGGCCTCCATTTCC |
| | | TGCCGGTCCTCGCAATCACTCCTGCATTCCAACGGTTACAACTACCTGAATTG |
| | | GTACCTCCAGAAGCCTGGCCAGTCGCCCCAGTTGCTGATCTATCTGGGCTCGA |
| | | AGCGCGCCTCCGGGGTGCCTGACCGGTTTAGCGGATCTGGGAGCGGCACGGAC |
| | | TTCACTCTCCACATCACCCGCGTGGGAGCGGAGGACGTGGGAGTGTACTACTG |
| | | TATGCAGGCGCTGCAGACTCCGTACACATTCGGACAGGGCACCAAGCTGGAGA |
| | | TCAAG |
| 139100- aa | 993 | QVQLVQSGAEVRKTGASVKVSCKASGYIFDNFGINWVRQAPGQGLEWMGWINP |
| VH | | KNNNTNYAQKFQGRVTITADESTNTAYMEVSSLRSEDTAVYYCARGPYYYQSY |
| | | MDVWGQGTMVTVSS |
| 139100- aa | 994 | DIVMTQTPLSLPVTPGEPASISCRSSQSLLHSNGYNYLNWYLQKPGQSPQLLI |
| VL | | YLGSKRASGVPDRFSGSGSGTDFTLHITRVGAEDVGVYYCMQALQTPYTFGQG |
| | | TKLEIK |
| 139100- aa | 995 | MALPVTALLLPLALLLHAARPQVQLVQSGAEVRKTGASVKVSCKASGYIFDNF |
| Full CAR | | GINWVRQAPGQGLEWMGWINPKNNNTNYAQKFQGRVTITADESTNTAYMEVSS |
| | | LRSEDTAVYYCARGPYYYQSYMDVWGQGTMVTVSSASGGGGSGGRASGGGGSD |
| | | IVMTQTPLSLPVTPGEPASISCRSSQSLLHSNGYNYLNWYLQKPGQSPQLLIY |
| | | LGSKRASGVPDRFSGSGSGTDFTLHITRVGAEDVGVYYCMQALQTPYTFGQGT |
| | | KLEIKTTTPAPRPPTPAPTIASQPLSLRPEACRPAAGGAVHTRGLDFACDIYI |
| | | WAPLAGTCGVLLLSLVITLYCKRGRKKLLYIFKQPFMRPVQTTQEEDGCSCRF |
| | | PEEEEGGCELRVKFSRSADAPAYKQGQNQLYNELNLGRREEYDVLDKRRGRDP |
| | | EMGGKPRRKNPQEGLYNELQKDKMAEAYSEIGMKGERRRGKGHDGLYQGLSTA |
| | | TKDTYDALHMQALPPR |
| 139100- nt | 996 | ATGGCCCTCCCTGTCACCGCCCTGCTGCTTCCGCTGGCTCTTCTGCTCCACGC |
| Full CAR | | CGCTCGGCCCCAAGTCCAACTCGTCCAGTCCGGCGCAGAAGTCAGAAAAACCG |
| | | GTGCTAGCGTGAAAGTGTCCTGCAAGGCCTCCGGCTACATTTTCGATAACTTC |
| | | GGAATCAACTGGGTCAGACAGGCCCCGGGCCAGGGGCTGGAATGGATGGGATG |
| | | GATCAACCCCAAGAACAACAACACCAACTACGCACAGAAGTTCCAGGGCCGCG |
| | | TGACTATCACCGCCGATGAATCGACCAATACCGCCTACATGGAGGTGTCCTCC |
| | | CTGCGGTCGGAGGACACTGCCGTGTATTACTGCGCGAGGGGCCCATACTACTA |
| | | CCAAAGCTACATGGACGTCTGGGGACAGGGAACCATGGTGACCGTGTCATCCG |
| | | CCTCCGGTGGTGGAGGCTCCGGGGGGCGGGCTTCAGGAGGCGGAGGAAGCGAT |
| | | ATTGTGATGACCCAGACTCCGCTTAGCCTGCCCGTGACTCCTGGAGAACCGGC |
| | | CTCCATTTCCTGCCGGTCCTCGCAATCACTCCTGCATTCCAACGGTTACAACT |
| | | ACCTGAATTGGTACCTCCAGAAGCCTGGCCAGTCGCCCCAGTTGCTGATCTAT |
| | | CTGGGCTCGAAGCGCGCCTCCGGGGTGCCTGACCGGTTTAGCGGATCTGGGAG |
| | | CGGCACGGACTTCACTCTCCACATCACCCGCGTGGGAGCGGAGGACGTGGGAG |
| | | TGTACTACTGTATGCAGGCGCTGCAGACTCCGTACACATTCGGACAGGGCACC |
| | | AAGCTGGAGATCAAGACCACTACCCCAGCACCGAGGCCACCCACCCCGGCTCC |
| | | TACCATCGCCTCCCAGCCTCTGTCCCTGCGTCCGGAGGCATGTAGACCCGCAG |
| | | CTGGTGGGGCCGTGCATACCCGGGGTCTTGACTTCGCCTGCGATATCTACATT |
| | | TGGGCCCCTCTGGCTGGTACTTGCGGGGTCCTGCTGCTTTCACTCGTGATCAC |
| | | TCTTTACTGTAAGCGCGGTCGGAAGAAGCTGCTGTACATCTTTAAGCAACCCT |
| | | TCATGAGGCCTGTGCAGACTACTCAAGAGGAGGACGGCTGTTCATGCCGGTTC |
| | | CCAGAGGAGGAGGAAGGCGGCTGCGAACTGCGCGTGAAATTCAGCCGCAGCGC |
| | | AGATGCTCCAGCCTACAAGCAGGGGCAGAACCAGCTCTACAACGAACTCAATC |
| | | TTGGTCGGAGAGAGGAGTACGACGTGCTGGACAAGCGGAGAGGACGGGACCCA |
| | | GAAATGGGCGGGAAGCCGCGCAGAAAGAATCCCCAAGAGGGCCTGTACAACGA |
| | | GCTCCAAAAGGATAAGATGGCAGAAGCCTATAGCGAGATTGGTATGAAAGGGG |
| | | AACGCAGAAGAGGCAAAGGCCACGACGGACTGTACCAGGGACTCAGCACCGCC |
| | | ACCAAGGACACCTATGACGCTCTTCACATGCAGGCCCTGCCGCCTCGG |

139101

| | | |
|---|---|---|
| 139101- aa | 997 | QVQLQESGGGLVQPGGSLRLSCAASGFTFSSDAMTWVRQAPGKGLEWVSVISG |
| ScFv domain | | SGGTTYYADSVKGRFTISRDNSKNTLYLQMNSLRAEDTAVYYCAKLDSSGYYY |
| | | ARGPRYWGQGTLVTVSSASGGGGSGGRASGGGGSDIQLTQSPSSLSASVGDRV |
| | | TITCRASQSISSYLNWYQQKPGKAPKLLIYGASTLASGVPARFSGSGSGTHFT |
| | | LTINSLQSEDSATYYCQQSYKRASFGQGTKVEIK |
| 139101- nt | 998 | CAAGTGCAACTTCAAGAATCAGGCGGAGGACTCGTGCAGCCCGGAGGATCATT |
| ScFv domain | | GCGGCTCTCGTGCGCCGCCTCGGGCTTCACCTTCTCGAGCGACGCCATGACCT |
| | | GGGTCCGCCAGGCCCCGGGGAAGGGGCTGGAATGGGTGTCTGTGATTTCCGGC |
| | | TCCGGGGGAACTACGTACTACGCCGATTCCGTGAAAGGTCGCTTCACTATCTC |
| | | CCGGGACAACAGCAAGAACACCCTTTATCTGCAAATGAATTCCCTCCGCGCCG |
| | | AGGACACCGCCGTGTACTACTGCGCCAAGCTGGACTCCTCGGGCTACTACTAT |
| | | GCCCGGGGTCCGAGATACTGGGGACAGGGAACCCTCGTGACCGTGTCCTCCGC |
| | | GTCCGGCGGAGGAGGGTCGGGAGGGCGGGCCTCCGGCGGCGGCGGTTCGGACA |
| | | TCCAGCTGACCCAGTCCCCATCCTCACTGAGCGCAAGCGTGGGCGACAGAGTC |
| | | ACCATTACATGCAGGGCGTCCCAGAGCATCAGCTCCTACCTGAACTGGTACCA |
| | | ACAGAAGCCTGGAAAGGCTCCTAAGCTGTTGATCTACGGGGCTTCGACCCTGG |
| | | CATCCGGGGTGCCCGCGAGGTTTAGCGGAAGCGGTAGCGGCACTCACTTCACT |
| | | CTGACCATTAACAGCCTCCAGTCCGAGGATTCAGCCACTTACTACTGTCAGCA |
| | | GTCCTACAAGCGGGCCAGCTTCGGACAGGGCACTAAGGTCGAGATCAAG |
| 139101- aa | 999 | QVQLQESGGGLVQPGGSLRLSCAASGFTFSSDAMTWVRQAPGKGLEWVSVISG |
| VH | | SGGTTYYADSVKGRFTISRDNSKNTLYLQMNSLRAEDTAVYYCAKLDSSGYYY |
| | | ARGPRYWGQGTLVTVSS |
| 139101- aa | 1000 | DIQLTQSPSSLSASVGDRVTITCRASQSISSYLNWYQQKPGKAPKLLIYGAST |
| VL | | LASGVPARFSGSGSGTHFTLTINSLQSEDSATYYCQQSYKRASFGQGTKVEIK |
| 139101- aa | 1001 | MALPVTALLLPLALLLHAARPQVQLQESGGGLVQPGGSLRLSCAASGFTFSSD |
| Full CAR | | AMTWVRQAPGKGLEWVSVISGSGGTTYYADSVKGRFTISRDNSKNTLYLQMNS |
| | | LRAEDTAVYYCAKLDSSGYYYARGPRYWGQGTLVTVSSASGGGGSGGRASGGG |
| | | GSDIQLTQSPSSLSASVGDRVTITCRASQSISSYLNWYQQKPGKAPKLLIYGA |
| | | STLASGVPARFSGSGSGTHFTLTINSLQSEDSATYYCQQSYKRASFGQGTKVE |
| | | IKTTTPAPRPPTPAPTIASQPLSLRPEACRPAAGGAVHTRGLDFACDIYIWAP |
| | | LAGTCGVLLLSLVITLYCKRGRKKLLYIFKQPFMRPVQTTQEEDGCSCRFPEE |
| | | EEGGCELRVKFSRSADAPAYKQGQNQLYNELNLGRREEYDVLDKRRGRDPEMG |
| | | GKPRRKNPQEGLYNELQKDKMAEAYSEIGMKGERRRGKGHDGLYQGLSTATKD |
| | | TYDALHMQALPPR |
| 139101- nt | 1002 | ATGGCCCTCCCTGTCACCGCCCTGCTGCTTCCGCTGGCTCTTCTGCTCCACGC |
| Full CAR | | CGCTCGGCCCCAAGTGCAACTTCAAGAATCAGGCGGAGGACTCGTGCAGCCCG |
| | | GAGGATCATTGCGGCTCTCGTGCGCCGCCTCGGGCTTCACCTTCTCGAGCGAC |
| | | GCCATGACCTGGGTCCGCCAGGCCCCGGGGAAGGGGCTGGAATGGGTGTCTGT |
| | | GATTTCCGGCTCCGGGGGAACTACGTACTACGCCGATTCCGTGAAAGGTCGCT |
| | | TCACTATCTCCCGGGACAACAGCAAGAACACCCTTTATCTGCAAATGAATTCC |
| | | CTCCGCGCCGAGGACACCGCCGTGTACTACTGCGCCAAGCTGGACTCCTCGGG |
| | | CTACTACTATGCCCGGGGTCCGAGATACTGGGGACAGGGAACCCTCGTGACCG |
| | | TGTCCTCCGCGTCCGGCGGAGGAGGGTCGGGAGGGCGGGCCTCCGGCGGCGGC |
| | | GGTTCGGACATCCAGCTGACCCAGTCCCCATCCTCACTGAGCGCAAGCGTGGG |
| | | CGACAGAGTCACCATTACATGCAGGGCGTCCCAGAGCATCAGCTCCTACCTGA |
| | | ACTGGTACCAACAGAAGCCTGGAAAGGCTCCTAAGCTGTTGATCTACGGGGCT |
| | | TCGACCCTGGCATCCGGGGTGCCCGCGAGGTTTAGCGGAAGCGGTAGCGGCAC |
| | | TCACTTCACTCTGACCATTAACAGCCTCCAGTCCGAGGATTCAGCCACTTACT |
| | | ACTGTCAGCAGTCCTACAAGCGGGCCAGCTTCGGACAGGGCACTAAGGTCGAG |
| | | ATCAAGACCACTACCCCAGCACCGAGGCCACCCACCCCGGCTCCTACCATCGC |
| | | CTCCCAGCCTCTGTCCCTGCGTCCGGAGGCATGTAGACCCGCAGCTGGTGGGG |
| | | CCGTGCATACCCGGGGTCTTGACTTCGCCTGCGATATCTACATTTGGGCCCCT |
| | | CTGGCTGGTACTTGCGGGGTCCTGCTGCTTTCACTCGTGATCACTCTTTACTG |
| | | TAAGCGCGGTCGGAAGAAGCTGCTGTACATCTTTAAGCAACCCTTCATGAGGC |
| | | CTGTGCAGACTACTCAAGAGGAGGACGGCTGTTCATGCCGGTTCCCAGAGGAG |
| | | GAGGAAGGCGGCTGCGAACTGCGCGTGAAATTCAGCCGCAGCGCAGATGCTCC |
| | | AGCCTACAAGCAGGGGCAGAACCAGCTCTACAACGAACTCAATCTTGGTCGGA |
| | | GAGAGGAGTACGACGTGCTGGACAAGCGGAGAGGACGGGACCCAGAAATGGGC |
| | | GGGAAGCCGCGCAGAAAGAATCCCCAAGAGGGCCTGTACAACGAGCTCCAAAA |
| | | GGATAAGATGGCAGAAGCCTATAGCGAGATTGGTATGAAAGGGGAACGCAGAA |
| | | GAGGCAAAGGCCACGACGGACTGTACCAGGGACTCAGCACCGCCACCAAGGAC |
| | | ACCTATGACGCTCTTCACATGCAGGCCCTGCCGCCTCGG |

139102

| | | |
|---|---|---|
| 139102- aa | 1003 | QVQLVQSGAEVKKPGASVKVSCKASGYTFSNYGITWVRQAPGQGLEWMGWISA |
| ScFv domain | | YNGNTNYAQKFQGRVTMTRNTSISTAYMELSSLRSEDTAVYYCARGPYYYYMD |
| | | VWGKGTMVTVSSASGGGGSGGRASGGGGSEIVMTQSPLSLPVTPGEPASISCR |
| | | SSQSLLYSNGYNYVDWYLQKPGQSPQLLIYLGSNRASGVPDRFSGSGSGTDFK |
| | | LQISRVEAEDVGIYYCMQGRQFPYSFGQGTKVEIK |
| 139102- nt | 1004 | CAAGTCCAACTGGTCCAGAGCGGTGCAGAAGTGAAGAAGCCCGGAGCGAGCGT |
| ScFv domain | | GAAAGTGTCCTGCAAGGCTTCCGGGTACACCTTCTCCAACTACGGCATCACTT |
| | | GGGTGCGCCAGGCCCCGGGACAGGGCCTGGAATGGATGGGGTGGATTTCCGCG |
| | | TACAACGGCAATACGAACTACGCTCAGAAGTTCCAGGGTAGAGTGACCATGAC |
| | | TAGGAACACCTCCATTTCCACCGCCTACATGGAACTGTCCTCCCTGCGGAGCG |
| | | AGGACACCGCCGTGTACTATTGCGCCCGGGGACCATACTACTACTACATGGAT |
| | | GTCTGGGGGAAGGGGACTATGGTCACCGTGTCATCCGCCTCGGGAGGCGGCGG |
| | | ATCAGGAGGACGCGCCTCTGGTGGTGGAGGATCGGAGATCGTGATGACCCAGA |
| | | GCCCTCTCTCCTTGCCCGTGACTCCTGGGGAGCCCGCATCCATTTCATGCCGG |
| | | AGCTCCCAGTCACTTCTCTACTCCAACGGCTATAACTACGTGGATTGGTACCT |
| | | CCAAAAGCCGGGCCAGAGCCCGCAGCTGCTGATCTACCTGGGCTCGAACAGGG |
| | | CCAGCGGAGTGCCTGACCGGTTCTCCGGGTCGGGAAGCGGGACCGACTTCAAG |
| | | CTGCAAATCTCGAGAGTGGAGGCCGAGGACGTGGGAATCTACTACTGTATGCA |
| | | GGGCCGCCAGTTTCCGTACTCGTTCGGACAGGGCACCAAAGTGGAAATCAAG |
| 139102- aa | 1005 | QVQLVQSGAEVKKPGASVKVSCKASGYTFSNYGITWVRQAPGQGLEWMGWISA |
| VH | | YNGNTNYAQKFQGRVTMTRNTSISTAYMELSSLRSEDTAVYYCARGPYYYYMD |
| | | VWGKGTMVTVSS |
| 139102- aa | 1006 | EIVMTQSPLSLPVTPGEPASISCRSSQSLLYSNGYNYVDWYLQKPGQSPQLLI |
| VL | | YLGSNRASGVPDRFSGSGSGTDFKLQISRVEAEDVGIYYCMQGRQFPYSFGQG |
| | | TKVEIK |
| 139102- aa | 1007 | MALPVTALLLPLALLLHAARPQVQLVQSGAEVKKPGASVKVSCKASGYTFSNY |
| Full CAR | | GITWVRQAPGQGLEWMGWISAYNGNTNYAQKFQGRVTMTRNTSISTAYMELSS |
| | | LRSEDTAVYYCARGPYYYYMDVWGKGTMVTVSSASGGGGSGGRASGGGGSEIV |
| | | MTQSPLSLPVTPGEPASISCRSSQSLLYSNGYNYVDWYLQKPGQSPQLLIYLG |
| | | SNRASGVPDRFSGSGSGTDFKLQISRVEAEDVGIYYCMQGRQFPYSFGQGTKV |
| | | EIKTTTPAPRPPTPAPTIASQPLSLRPEACRPAAGGAVHTRGLDFACDIYIWA |
| | | PLAGTCGVLLLSLVITLYCKRGRKKLLYIFKQPFMRPVQTTQEEDGCSCRFPE |
| | | EEEGGCELRVKFSRSADAPAYKQGQNQLYNELNLGRREEYDVLDKRRGRDPEM |
| | | GGKPRRKNPQEGLYNELQKDKMAEAYSEIGMKGERRRGKGHDGLYQGLSTATK |
| | | DTYDALHMQALPPR |
| 139102- nt | 1008 | ATGGCCCTCCCTGTCACCGCCCTGCTGCTTCCGCTGGCTCTTCTGCTCCACGC |
| Full CAR | | CGCTCGGCCCCAAGTCCAACTGGTCCAGAGCGGTGCAGAAGTGAAGAAGCCCG |
| | | GAGCGAGCGTGAAAGTGTCCTGCAAGGCTTCCGGGTACACCTTCTCCAACTAC |
| | | GGCATCACTTGGGTGCGCCAGGCCCCGGGACAGGGCCTGGAATGGATGGGGTG |
| | | GATTTCCGCGTACAACGGCAATACGAACTACGCTCAGAAGTTCCAGGGTAGAG |
| | | TGACCATGACTAGGAACACCTCCATTTCCACCGCCTACATGGAACTGTCCTCC |
| | | CTGCGGAGCGAGGACACCGCCGTGTACTATTGCGCCCGGGGACCATACTACTA |
| | | CTACATGGATGTCTGGGGGAAGGGGACTATGGTCACCGTGTCATCCGCCTCGG |
| | | GAGGCGGCGGATCAGGAGGACGCGCCTCTGGTGGTGGAGGATCGGAGATCGTG |
| | | ATGACCCAGAGCCCTCTCTCCTTGCCCGTGACTCCTGGGGAGCCCGCATCCAT |
| | | TTCATGCCGGAGCTCCCAGTCACTTCTCTACTCCAACGGCTATAACTACGTGG |
| | | ATTGGTACCTCCAAAAGCCGGGCCAGAGCCCGCAGCTGCTGATCTACCTGGGC |
| | | TCGAACAGGGCCAGCGGAGTGCCTGACCGGTTCTCCGGGTCGGGAAGCGGGAC |
| | | CGACTTCAAGCTGCAAATCTCGAGAGTGGAGGCCGAGGACGTGGGAATCTACT |
| | | ACTGTATGCAGGGCCGCCAGTTTCCGTACTCGTTCGGACAGGGCACCAAAGTG |
| | | GAAATCAAGACCACTACCCCAGCACCGAGGCCACCCACCCCGGCTCCTACCAT |
| | | CGCCTCCCAGCCTCTGTCCCTGCGTCCGGAGGCATGTAGACCCGCAGCTGGTG |
| | | GGGCCGTGCATACCCGGGGTCTTGACTTCGCCTGCGATATCTACATTTGGGCC |
| | | CCTCTGGCTGGTACTTGCGGGGTCCTGCTGCTTTCACTCGTGATCACTCTTTA |
| | | CTGTAAGCGCGGTCGGAAGAAGCTGCTGTACATCTTTAAGCAACCCTTCATGA |
| | | GGCCTGTGCAGACTACTCAAGAGGAGGACGGCTGTTCATGCCGGTTCCCAGAG |
| | | GAGGAGGAAGGCGGCTGCGAACTGCGCGTGAAATTCAGCCGCAGCGCAGATGC |
| | | TCCAGCCTACAAGCAGGGGCAGAACCAGCTCTACAACGAACTCAATCTTGGTC |
| | | GGAGAGAGGAGTACGACGTGCTGGACAAGCGGAGAGGACGGGACCCAGAAATG |
| | | GGCGGGAAGCCGCGCAGAAAGAATCCCCAAGAGGGCCTGTACAACGAGCTCCA |
| | | AAAGGATAAGATGGCAGAAGCCTATAGCGAGATTGGTATGAAAGGGGAACGCA |
| | | GAAGAGGCAAAGGCCACGACGGACTGTACCAGGGACTCAGCACCGCCACCAAG |
| | | GACACCTATGACGCTCTTCACATGCAGGCCCTGCCGCCTCGG |

139104

| | | |
|---|---|---|
| 139104- aa | 1009 | EVQLLETGGGLVQPGGSLRLSCAVSGFALSNHGMSWVRRAPGKGLEWVSGIVY |
| ScFv domain | | SGSTYYAASVKGRFTISRDNSRNTLYLQMNSLRPEDTAIYYCSAHGGESDVWG |
| | | QGTTVTVSSASGGGGSGGRASGGGGSEIVLTQSPATLSVSPGESATLSCRASQ |
| | | SVSSNLAWYQQKPGQAPRLLIYGASTRASGIPDRFSGSGSGTDFTLTISSLQA |
| | | EDVAVYYCQQYGSSLTFGGGTKVEIK |
| 139104- nt | 1010 | GAAGTGCAATTGCTCGAAACTGGAGGAGGTCTGGTGCAACCTGGAGGATCACT |
| ScFv domain | | TCGCCTGTCCTGCGCCGTGTCGGGCTTTGCCCTGTCCAACCATGGAATGAGCT |
| | | GGGTCCGCCGCGCGCCGGGGAAGGGCCTCGAATGGGTGTCCGGCATCGTCTAC |
| | | TCCGGCTCCACCTACTACGCCGCGTCCGTGAAGGGCCGGTTCACGATTTCACG |
| | | GGACAACTCGCGGAACACCCTGTACCTCCAAATGAATTCCCTTCGGCCGGAGG |
| | | ATACTGCCATCTACTACTGCTCCGCCCACGGTGGCGAATCCGACGTCTGGGGC |
| | | CAGGGAACCACCGTGACCGTGTCCAGCGCGTCCGGGGGAGGAGGAAGCGGGGG |
| | | TAGAGCATCGGGTGGAGGCGGATCAGAGATCGTGCTGACCCAGTCCCCCGCCA |
| | | CCTTGAGCGTGTCACCAGGAGAGTCCGCCACCCTGTCATGCCGCGCCAGCCAG |
| | | TCCGTGTCCTCCAACCTGGCTTGGTACCAGCAGAAGCCGGGGCAGGCCCCTAG |
| | | ACTCCTGATCTATGGGGCGTCGACCCGGGCATCTGGAATTCCCGATAGGTTCA |
| | | GCGGATCGGGCTCGGGCACTGACTTCACTCTGACCATCTCCTCGCTGCAAGCC |
| | | GAGGACGTGGCTGTGTACTACTGTCAGCAGTACGGAAGCTCCCTGACTTTCGG |
| | | TGGCGGGACCAAAGTCGAGATTAAG |
| 139104- aa | 1011 | EVQLLETGGGLVQPGGSLRLSCAVSGFALSNHGMSWVRRAPGKGLEWVSGIVY |
| VH | | SGSTYYAASVKGRFTISRDNSRNTLYLQMNSLRPEDTAIYYCSAHGGESDVWG |
| | | QGTTVTVSS |
| 139104- aa | 1012 | EIVLTQSPATLSVSPGESATLSCRASQSVSSNLAWYQQKPGQAPRLLIYGAST |
| VL | | RASGIPDRFSGSGSGTDFTLTISSLQAEDVAVYYCQQYGSSLTFGGGTKVEIK |
| 139104- aa | 1013 | MALPVTALLLPLALLLHAARPEVQLLETGGGLVQPGGSLRLSCAVSGFALSNH |
| Full CAR | | GMSWVRRAPGKGLEWVSGIVYSGSTYYAASVKGRFTISRDNSRNTLYLQMNSL |
| | | RPEDTAIYYCSAHGGESDVWGQGTTVTVSSASGGGGSGGRASGGGGSEIVLTQ |
| | | SPATLSVSPGESATLSCRASQSVSSNLAWYQQKPGQAPRLLIYGASTRASGIP |
| | | DRFSGSGSGTDFTLTISSLQAEDVAVYYCQQYGSSLTFGGGTKVEIKTTTPAP |
| | | RPPTPAPTIASQPLSLRPEACRPAAGGAVHTRGLDFACDIYIWAPLAGTCGVL |
| | | LLSLVITLYCKRGRKKLLYIFKQPFMRPVQTTQEEDGCSCRFPEEEEGGCELR |
| | | VKFSRSADAPAYKQGQNQLYNELNLGRREEYDVLDKRRGRDPEMGGKPRRKNP |
| | | QEGLYNELQKDKMAEAYSEIGMKGERRRGKGHDGLYQGLSTATKDTYDALHMQ |
| | | ALPPR |
| 139104- nt | 1014 | ATGGCCCTCCCTGTCACCGCCCTGCTGCTTCCGCTGGCTCTTCTGCTCCACGC |
| Full CAR | | CGCTCGGCCCGAAGTGCAATTGCTCGAAACTGGAGGAGGTCTGGTGCAACCTG |
| | | GAGGATCACTTCGCCTGTCCTGCGCCGTGTCGGGCTTTGCCCTGTCCAACCAT |
| | | GGAATGAGCTGGGTCCGCCGCGCGCCGGGGAAGGGCCTCGAATGGGTGTCCGG |
| | | CATCGTCTACTCCGGCTCCACCTACTACGCCGCGTCCGTGAAGGGCCGGTTCA |
| | | CGATTTCACGGGACAACTCGCGGAACACCCTGTACCTCCAAATGAATTCCCTT |
| | | CGGCCGGAGGATACTGCCATCTACTACTGCTCCGCCCACGGTGGCGAATCCGA |
| | | CGTCTGGGGCCAGGGAACCACCGTGACCGTGTCCAGCGCGTCCGGGGGAGGAG |
| | | GAAGCGGGGGTAGAGCATCGGGTGGAGGCGGATCAGAGATCGTGCTGACCCAG |
| | | TCCCCCGCCACCTTGAGCGTGTCACCAGGAGAGTCCGCCACCCTGTCATGCCG |
| | | CGCCAGCCAGTCCGTGTCCTCCAACCTGGCTTGGTACCAGCAGAAGCCGGGGC |
| | | AGGCCCCTAGACTCCTGATCTATGGGGCGTCGACCCGGGCATCTGGAATTCCC |
| | | GATAGGTTCAGCGGATCGGGCTCGGGCACTGACTTCACTCTGACCATCTCCTC |
| | | GCTGCAAGCCGAGGACGTGGCTGTGTACTACTGTCAGCAGTACGGAAGCTCCC |
| | | TGACTTTCGGTGGCGGGACCAAAGTCGAGATTAAGACCACTACCCCAGCACCG |
| | | AGGCCACCCACCCCGGCTCCTACCATCGCCTCCCAGCCTCTGTCCCTGCGTCC |
| | | GGAGGCATGTAGACCCGCAGCTGGTGGGGCCGTGCATACCCGGGGTCTTGACT |
| | | TCGCCTGCGATATCTACATTTGGGCCCCTCTGGCTGGTACTTGCGGGGTCCTG |
| | | CTGCTTTCACTCGTGATCACTCTTTACTGTAAGCGCGGTCGGAAGAAGCTGCT |
| | | GTACATCTTTAAGCAACCCTTCATGAGGCCTGTGCAGACTACTCAAGAGGAGG |
| | | ACGGCTGTTCATGCCGGTTCCCAGAGGAGGAGGAAGGCGGCTGCGAACTGCGC |
| | | GTGAAATTCAGCCGCAGCGCAGATGCTCCAGCCTACAAGCAGGGGCAGAACCA |
| | | GCTCTACAACGAACTCAATCTTGGTCGGAGAGAGGAGTACGACGTGCTGGACA |
| | | AGCGGAGAGGACGGGACCCAGAAATGGGCGGGAAGCCGCGCAGAAAGAATCCC |
| | | CAAGAGGGCCTGTACAACGAGCTCCAAAAGGATAAGATGGCAGAAGCCTATAG |
| | | CGAGATTGGTATGAAAGGGGAACGCAGAAGAGGCAAAGGCCACGACGGACTGT |
| | | ACCAGGGACTCAGCACCGCCACCAAGGACACCTATGACGCTCTTCACATGCAG |
| | | GCCCTGCCGCCTCGG |

139106

| | | |
|---|---|---|
| 139106- aa | 1015 | EVQLVETGGGLVQPGGSLRLSCAVSGFALSNHGMSWVRRAPGKGLEWVSGIVY |
| ScFv domain | | SGSTYYAASVKGRFTISRDNSRNTLYLQMNSLRPEDTAIYYCSAHGGESDVWG |
| | | QGTTVTVSSASGGGGSGGRASGGGGSEIVMTQSPATLSVSPGERATLSCRASQ |
| | | SVSSKLAWYQQKPGQAPRLLMYGASIRATGIPDRFSGSGSGTEFTLTISSLEP |
| | | EDFAVYYCQQYGSSSWTFGQGTKVEIK |
| 139106- nt | 1016 | GAAGTGCAATTGGTGGAAACTGGAGGAGGACTTGTGCAACCTGGAGGATCATT |
| ScFv domain | | GAGACTGAGCTGCGCAGTGTCGGGATTCGCCCTGAGCAACCATGGAATGTCCT |
| | | GGGTCAGAAGGGCCCCTGGAAAAGGCCTCGAATGGGTGTCAGGGATCGTGTAC |
| | | TCCGGTTCCACTTACTACGCCGCCTCCGTGAAGGGGCGCTTCACTATCTCACG |
| | | GGATAACTCCCGCAATACCCTGTACCTCCAAATGAACAGCCTGCGGCCGGAGG |
| | | ATACCGCCATCTACTACTGTTCCGCCCACGGTGGAGAGTCTGACGTCTGGGGC |
| | | CAGGGAACTACCGTGACCGTGTCCTCCGCGTCCGGCGGTGGAGGGAGCGGCGG |
| | | CCGCGCCAGCGGCGGCGGAGGCTCCGAGATCGTGATGACCCAGAGCCCCGCTA |
| | | CTCTGTCGGTGTCGCCCGGAGAAAGGGCGACCCTGTCCTGCCGGGCGTCGCAG |
| | | TCCGTGAGCAGCAAGCTGGCTTGGTACCAGCAGAAGCCGGGCCAGGCACCACG |
| | | CCTGCTTATGTACGGTGCCTCCATTCGGGCCACCGGAATCCCGGACCGGTTCT |
| | | CGGGGTCGGGGTCCGGTACCGAGTTCACACTGACCATTTCCTCGCTCGAGCCC |
| | | GAGGACTTTGCCGTCTATTACTGCCAGCAGTACGGCTCCTCCTCATGGACGTT |
| | | CGGCCAGGGGACCAAGGTCGAAATCAAG |
| 139106- aa | 1017 | EVQLVETGGGLVQPGGSLRLSCAVSGFALSNHGMSWVRRAPGKGLEWVSGIVY |
| VH | | SGSTYYAASVKGRFTISRDNSRNTLYLQMNSLRPEDTAIYYCSAHGGESDVWG |
| | | QGTTVTVSS |
| 139106- aa | 1018 | EIVMTQSPATLSVSPGERATLSCRASQSVSSKLAWYQQKPGQAPRLLMYGASI |
| VL | | RATGIPDRFSGSGSGTEFTLTISSLEPEDFAVYYCQQYGSSSWTFGQGTKVEI |
| | | K |
| 139106- aa | 1019 | MALPVTALLLPLALLLHAARPEVQLVETGGGLVQPGGSLRLSCAVSGFALSNH |
| Full CAR | | GMSWVRRAPGKGLEWVSGIVYSGSTYYAASVKGRFTISRDNSRNTLYLQMNSL |
| | | RPEDTAIYYCSAHGGESDVWGQGTTVTVSSASGGGGSGGRASGGGGSEIVMTQ |
| | | SPATLSVSPGERATLSCRASQSVSSKLAWYQQKPGQAPRLLMYGASIRATGIP |
| | | DRFSGSGSGTEFTLTISSLEPEDFAVYYCQQYGSSSWTFGQGTKVEIKTTTPA |
| | | PRPPTPAPTIASQPLSLRPEACRPAAGGAVHTRGLDFACDIYIWAPLAGTCGV |
| | | LLLSLVITLYCKRGRKKLLYIFKQPFMRPVQTTQEEDGCSCRFPEEEEGGCEL |
| | | RVKFSRSADAPAYKQGQNQLYNELNLGRREEYDVLDKRRGRDPEMGGKPRRKN |
| | | PQEGLYNELQKDKMAEAYSEIGMKGERRRGKGHDGLYQGLSTATKDTYDALHM |
| | | QALPPR |
| 139106- nt | 1020 | ATGGCCCTCCCTGTCACCGCCCTGCTGCTTCCGCTGGCTCTTCTGCTCCACGC |
| Full CAR | | CGCTCGGCCCGAAGTGCAATTGGTGGAAACTGGAGGAGGACTTGTGCAACCTG |
| | | GAGGATCATTGAGACTGAGCTGCGCAGTGTCGGGATTCGCCCTGAGCAACCAT |
| | | GGAATGTCCTGGGTCAGAAGGGCCCCTGGAAAAGGCCTCGAATGGGTGTCAGG |
| | | GATCGTGTACTCCGGTTCCACTTACTACGCCGCCTCCGTGAAGGGGCGCTTCA |
| | | CTATCTCACGGGATAACTCCCGCAATACCCTGTACCTCCAAATGAACAGCCTG |
| | | CGGCCGGAGGATACCGCCATCTACTACTGTTCCGCCCACGGTGGAGAGTCTGA |
| | | CGTCTGGGGCCAGGGAACTACCGTGACCGTGTCCTCCGCGTCCGGCGGTGGAG |
| | | GGAGCGGCGGCCGCGCCAGCGGCGGCGGAGGCTCCGAGATCGTGATGACCCAG |
| | | AGCCCCGCTACTCTGTCGGTGTCGCCCGGAGAAAGGGCGACCCTGTCCTGCCG |
| | | GGCGTCGCAGTCCGTGAGCAGCAAGCTGGCTTGGTACCAGCAGAAGCCGGGCC |
| | | AGGCACCACGCCTGCTTATGTACGGTGCCTCCATTCGGGCCACCGGAATCCCG |
| | | GACCGGTTCTCGGGGTCGGGGTCCGGTACCGAGTTCACACTGACCATTTCCTC |
| | | GCTCGAGCCCGAGGACTTTGCCGTCTATTACTGCCAGCAGTACGGCTCCTCCT |
| | | CATGGACGTTCGGCCAGGGGACCAAGGTCGAAATCAAGACCACTACCCCAGCA |
| | | CCGAGGCCACCCACCCCGGCTCCTACCATCGCCTCCCAGCCTCTGTCCCTGCG |
| | | TCCGGAGGCATGTAGACCCGCAGCTGGTGGGGCCGTGCATACCCGGGGTCTTG |
| | | ACTTCGCCTGCGATATCTACATTTGGGCCCCTCTGGCTGGTACTTGCGGGGTC |
| | | CTGCTGCTTTCACTCGTGATCACTCTTTACTGTAAGCGCGGTCGGAAGAAGCT |
| | | GCTGTACATCTTTAAGCAACCCTTCATGAGGCCTGTGCAGACTACTCAAGAGG |
| | | AGGACGGCTGTTCATGCCGGTTCCCAGAGGAGGAGGAAGGCGGCTGCGAACTG |
| | | CGCGTGAAATTCAGCCGCAGCGCAGATGCTCCAGCCTACAAGCAGGGGCAGAA |
| | | CCAGCTCTACAACGAACTCAATCTTGGTCGGAGAGAGGAGTACGACGTGCTGG |
| | | ACAAGCGGAGAGGACGGGACCCAGAAATGGGCGGGAAGCCGCGCAGAAAGAAT |
| | | CCCCAAGAGGGCCTGTACAACGAGCTCCAAAAGGATAAGATGGCAGAAGCCTA |
| | | TAGCGAGATTGGTATGAAAGGGGAACGCAGAAGAGGCAAAGGCCACGACGGAC |
| | | TGTACCAGGGACTCAGCACCGCCACCAAGGACACCTATGACGCTCTTCACATG |
| | | CAGGCCCTGCCGCCTCGG |

139107

| | | |
|---|---|---|
| 139107- aa | 1021 | EVQLVETGGGVVQPGGSLRLSCAVSGFALSNHGMSWVRRAPGKGLEWVSGIVY |
| ScFv domain | | SGSTYYAASVKGRFTISRDNSRNTLYLQMNSLRPEDTAIYYCSAHGGESDVWG |
| | | QGTTVTVSSASGGGGSGGRASGGGGSEIVLTQSPGTLSLSPGERATLSCRASQ |
| | | SVGSTNLAWYQQKPGQAPRLLIYDASNRATGIPDRFSGGGSGTDFTLTISRLE |
| | | PEDFAVYYCQQYGSSPPWTFGQGTKVEIK |
| 139107- nt | 1022 | GAAGTGCAATTGGTGGAGACTGGAGGAGGAGTGGTGCAACCTGGAGGAAGCCT |
| ScFv domain | | GAGACTGTCATGCGCGGTGTCGGGCTTCGCCCTCTCCAACCACGGAATGTCCT |
| | | GGGTCCGCCGGGCCCCTGGGAAAGGACTTGAATGGGTGTCCGGCATCGTGTAC |
| | | TCGGGTTCCACCTACTACGCGGCCTCAGTGAAGGGCCGGTTTACTATTAGCCG |
| | | CGACAACTCCAGAAACACACTGTACCTCCAAATGAACTCGCTGCGGCCGGAAG |
| | | ATACCGCTATCTACTACTGCTCCGCCCATGGGGGAGAGTCGGACGTCTGGGGA |
| | | CAGGGCACCACTGTCACTGTGTCCAGCGCTTCCGGCGGTGGTGGAAGCGGGGG |
| | | ACGGGCCTCAGGAGGCGGTGGCAGCGAGATTGTGCTGACCCAGTCCCCCGGGA |
| | | CCCTGAGCCTGTCCCCGGGAGAAAGGGCCACCCTCTCCTGTCGGGCATCCCAG |
| | | TCCGTGGGGTCTACTAACCTTGCATGGTACCAGCAGAAGCCCGGCCAGGCCCC |
| | | TCGCCTGCTGATCTACGACGCGTCCAATAGAGCCACCGGCATCCCGGATCGCT |
| | | TCAGCGGAGGCGGATCGGGCACCGACTTCACCCTCACCATTTCAAGGCTGGAA |
| | | CCGGAGGACTTCGCCGTGTACTACTGCCAGCAGTATGGTTCGTCCCCACCCTG |
| | | GACGTTCGGCCAGGGGACTAAGGTCGAGATCAAG |
| 139107- aa | 1023 | EVQLVETGGGVVQPGGSLRLSCAVSGFALSNHGMSWVRRAPGKGLEWVSGIVY |
| VH | | SGSTYYAASVKGRFTISRDNSRNTLYLQMNSLRPEDTAIYYCSAHGGESDVWG |
| | | QGTTVTVSS |
| 139107- aa | 1024 | EIVLTQSPGTLSLSPGERATLSCRASQSVGSTNLAWYQQKPGQAPRLLIYDAS |
| VL | | NRATGIPDRFSGGGSGTDFTLTISRLEPEDFAVYYCQQYGSSPPWTFGQGTKV |
| | | EIK |
| 139107- aa | 1025 | MALPVTALLLPLALLLHAARPEVQLVETGGGVVQPGGSLRLSCAVSGFALSNH |
| Full CAR | | GMSWVRRAPGKGLEWVSGIVYSGSTYYAASVKGRFTISRDNSRNTLYLQMNSL |
| | | RPEDTAIYYCSAHGGESDVWGQGTTVTVSSASGGGGSGGRASGGGGSEIVLTQ |
| | | SPGTLSLSPGERATLSCRASQSVGSTNLAWYQQKPGQAPRLLIYDASNRATGI |
| | | PDRFSGGGSGTDFTLTISRLEPEDFAVYYCQQYGSSPPWTFGQGTKVEIKTTT |
| | | PAPRPPTPAPTIASQPLSLRPEACRPAAGGAVHTRGLDFACDIYIWAPLAGTC |
| | | GVLLLSLVITLYCKRGRKKLLYIFKQPFMRPVQTTQEEDGCSCRFPEEEEGGC |
| | | ELRVKFSRSADAPAYKQGQNQLYNELNLGRREEYDVLDKRRGRDPEMGGKPRR |
| | | KNPQEGLYNELQKDKMAEAYSEIGMKGERRRGKGHDGLYQGLSTATKDTYDAL |
| | | HMQALPPR |
| 139107- nt | 1026 | ATGGCCCTCCCTGTCACCGCCCTGCTGCTTCCGCTGGCTCTTCTGCTCCACGC |
| Full CAR | | CGCTCGGCCCGAAGTGCAATTGGTGGAGACTGGAGGAGGAGTGGTGCAACCTG |
| | | GAGGAAGCCTGAGACTGTCATGCGCGGTGTCGGGCTTCGCCCTCTCCAACCAC |
| | | GGAATGTCCTGGGTCCGCCGGGCCCCTGGGAAAGGACTTGAATGGGTGTCCGG |
| | | CATCGTGTACTCGGGTTCCACCTACTACGCGGCCTCAGTGAAGGGCCGGTTTA |
| | | CTATTAGCCGCGACAACTCCAGAAACACACTGTACCTCCAAATGAACTCGCTG |
| | | CGGCCGGAAGATACCGCTATCTACTACTGCTCCGCCCATGGGGGAGAGTCGGA |
| | | CGTCTGGGGACAGGGCACCACTGTCACTGTGTCCAGCGCTTCCGGCGGTGGTG |
| | | GAAGCGGGGGACGGGCCTCAGGAGGCGGTGGCAGCGAGATTGTGCTGACCCAG |
| | | TCCCCCGGGACCCTGAGCCTGTCCCCGGGAGAAAGGGCCACCCTCTCCTGTCG |
| | | GGCATCCCAGTCCGTGGGGTCTACTAACCTTGCATGGTACCAGCAGAAGCCCG |
| | | GCCAGGCCCCTCGCCTGCTGATCTACGACGCGTCCAATAGAGCCACCGGCATC |
| | | CCGGATCGCTTCAGCGGAGGCGGATCGGGCACCGACTTCACCCTCACCATTTC |
| | | AAGGCTGGAACCGGAGGACTTCGCCGTGTACTACTGCCAGCAGTATGGTTCGT |
| | | CCCCACCCTGGACGTTCGGCCAGGGGACTAAGGTCGAGATCAAGACCACTACC |
| | | CCAGCACCGAGGCCACCCACCCCGGCTCCTACCATCGCCTCCCAGCCTCTGTC |
| | | CCTGCGTCCGGAGGCATGTAGACCCGCAGCTGGTGGGGCCGTGCATACCCGGG |
| | | GTCTTGACTTCGCCTGCGATATCTACATTTGGGCCCCTCTGGCTGGTACTTGC |
| | | GGGGTCCTGCTGCTTTCACTCGTGATCACTCTTTACTGTAAGCGCGGTCGGAA |
| | | GAAGCTGCTGTACATCTTTAAGCAACCCTTCATGAGGCCTGTGCAGACTACTC |
| | | AAGAGGAGGACGGCTGTTCATGCCGGTTCCCAGAGGAGGAGGAAGGCGGCTGC |
| | | GAACTGCGCGTGAAATTCAGCCGCAGCGCAGATGCTCCAGCCTACAAGCAGGG |
| | | GCAGAACCAGCTCTACAACGAACTCAATCTTGGTCGGAGAGAGGAGTACGACG |
| | | TGCTGGACAAGCGGAGAGGACGGGACCCAGAAATGGGCGGGAAGCCGCGCAGA |
| | | AAGAATCCCCAAGAGGGCCTGTACAACGAGCTCCAAAAGGATAAGATGGCAGA |
| | | AGCCTATAGCGAGATTGGTATGAAAGGGGAACGCAGAAGAGGCAAAGGCCACG |
| | | ACGGACTGTACCAGGGACTCAGCACCGCCACCAAGGACACCTATGACGCTCTT |
| | | CACATGCAGGCCCTGCCGCCTCGG |

139108

| | | |
|---|---|---|
| 139108- aa | 1027 | QVQLVESGGGLVKPGGSLRLSCAASGFTFSDYYMSWIRQAPGKGLEWVSYISS |
| ScFv domain | | SGSTIYYADSVKGRFTISRDNAKNSLYLQMNSLRAEDTAVYYCARESGDGMDV |
| | | WGQGTTVTVSSASGGGGSGGRASGGGGSDIQMTQSPSSLSASVGDRVTITCRA |
| | | SQSISSYLNWYQQKPGKAPKLLIYAASSLQSGVPSRFSGSGSGTDFTLTISSL |
| | | QPEDFATYYCQQSYTLAFGQGTKVDIK |
| 139108- nt | 1028 | CAAGTGCAACTCGTGGAATCTGGTGGAGGACTCGTGAAACCTGGAGGATCATT |
| ScFv domain | | GAGACTGTCATGCGCGGCCTCGGGATTCACGTTCTCCGATTACTACATGAGCT |
| | | GGATTCGCCAGGCTCCGGGGAAGGGACTGGAATGGGTGTCCTACATTTCCTCA |
| | | TCCGGCTCCACCATCTACTACGCGGACTCCGTGAAGGGGAGATTCACCATTAG |
| | | CCGCGATAACGCCAAGAACAGCCTGTACCTTCAGATGAACTCCCTGCGGGCTG |
| | | AAGATACTGCCGTCTACTACTGCGCAAGGGAGAGCGGAGATGGGATGGACGTC |
| | | TGGGGACAGGGTACCACTGTGACCGTGTCGTCGGCCTCCGGCGGAGGGGGTTC |
| | | GGGTGGAAGGGCCAGCGGCGGCGGAGGCAGCGACATCCAGATGACCCAGTCCC |
| | | CCTCATCGCTGTCCGCCTCCGTGGGCGACCGCGTCACCATCACATGCCGGGCC |
| | | TCACAGTCGATCTCCTCCTACCTCAATTGGTATCAGCAGAAGCCCGGAAAGGC |
| | | CCCTAAGCTTCTGATCTACGCAGCGTCCTCCCTGCAATCCGGGGTCCCATCTC |
| | | GGTTCTCCGGCTCGGGCAGCGGTACCGACTTCACTCTGACCATCTCGAGCCTG |
| | | CAGCCGGAGGACTTCGCCACTTACTACTGTCAGCAAAGCTACACCCTCGCGTT |
| | | TGGCCAGGGCACCAAAGTGGACATCAAG |
| 139108- aa | 1029 | QVQLVESGGGLVKPGGSLRLSCAASGFTFSDYYMSWIRQAPGKGLEWVSYISS |
| VH | | SGSTIYYADSVKGRFTISRDNAKNSLYLQMNSLRAEDTAVYYCARESGDGMDV |
| | | WGQGTTVTVSS |
| 139108- aa | 1030 | DIQMTQSPSSLSASVGDRVTITCRASQSISSYLNWYQQKPGKAPKLLIYAASS |
| VL | | LQSGVPSRFSGSGSGTDFTLTISSLQPEDFATYYCQQSYTLAFGQGTKVDIK |
| 139108- aa | 1031 | MALPVTALLLPLALLLHAARPQVQLVESGGGLVKPGGSLRLSCAASGFTFSDY |
| Full CAR | | YMSWIRQAPGKGLEWVSYISSSGSTIYYADSVKGRFTISRDNAKNSLYLQMNS |
| | | LRAEDTAVYYCARESGDGMDVWGQGTTVTVSSASGGGGSGGRASGGGGSDIQM |
| | | TQSPSSLSASVGDRVTITCRASQSISSYLNWYQQKPGKAPKLLIYAASSLQSG |
| | | VPSRFSGSGSGTDFTLTISSLQPEDFATYYCQQSYTLAFGQGTKVDIKTTTPA |
| | | PRPPTPAPTIASQPLSLRPEACRPAAGGAVHTRGLDFACDIYIWAPLAGTCGV |
| | | LLLSLVITLYCKRGRKKLLYIFKQPFMRPVQTTQEEDGCSCRFPEEEEGGCEL |
| | | RVKFSRSADAPAYKQGQNQLYNELNLGRREEYDVLDKRRGRDPEMGGKPRRKN |
| | | PQEGLYNELQKDKMAEAYSEIGMKGERRRGKGHDGLYQGLSTATKDTYDALHM |
| | | QALPPR |
| 139108- nt | 1032 | ATGGCCCTCCCTGTCACCGCCCTGCTGCTTCCGCTGGCTCTTCTGCTCCACGC |
| Full CAR | | CGCTCGGCCCCAAGTGCAACTCGTGGAATCTGGTGGAGGACTCGTGAAACCTG |
| | | GAGGATCATTGAGACTGTCATGCGCGGCCTCGGGATTCACGTTCTCCGATTAC |
| | | TACATGAGCTGGATTCGCCAGGCTCCGGGGAAGGGACTGGAATGGGTGTCCTA |
| | | CATTTCCTCATCCGGCTCCACCATCTACTACGCGGACTCCGTGAAGGGGAGAT |
| | | TCACCATTAGCCGCGATAACGCCAAGAACAGCCTGTACCTTCAGATGAACTCC |
| | | CTGCGGGCTGAAGATACTGCCGTCTACTACTGCGCAAGGGAGAGCGGAGATGG |
| | | GATGGACGTCTGGGGACAGGGTACCACTGTGACCGTGTCGTCGGCCTCCGGCG |
| | | GAGGGGGTTCGGGTGGAAGGGCCAGCGGCGGCGGAGGCAGCGACATCCAGATG |
| | | ACCCAGTCCCCCTCATCGCTGTCCGCCTCCGTGGGCGACCGCGTCACCATCAC |
| | | ATGCCGGGCCTCACAGTCGATCTCCTCCTACCTCAATTGGTATCAGCAGAAGC |
| | | CCGGAAAGGCCCCTAAGCTTCTGATCTACGCAGCGTCCTCCCTGCAATCCGGG |
| | | GTCCCATCTCGGTTCTCCGGCTCGGGCAGCGGTACCGACTTCACTCTGACCAT |
| | | CTCGAGCCTGCAGCCGGAGGACTTCGCCACTTACTACTGTCAGCAAAGCTACA |
| | | CCCTCGCGTTTGGCCAGGGCACCAAAGTGGACATCAAGACCACTACCCCAGCA |
| | | CCGAGGCCACCCACCCCGGCTCCTACCATCGCCTCCCAGCCTCTGTCCCTGCG |
| | | TCCGGAGGCATGTAGACCCGCAGCTGGTGGGGCCGTGCATACCCGGGGTCTTG |
| | | ACTTCGCCTGCGATATCTACATTTGGGCCCCTCTGGCTGGTACTTGCGGGGTC |
| | | CTGCTGCTTTCACTCGTGATCACTCTTTACTGTAAGCGCGGTCGGAAGAAGCT |
| | | GCTGTACATCTTTAAGCAACCCTTCATGAGGCCTGTGCAGACTACTCAAGAGG |
| | | AGGACGGCTGTTCATGCCGGTTCCCAGAGGAGGAGGAAGGCGGCTGCGAACTG |
| | | CGCGTGAAATTCAGCCGCAGCGCAGATGCTCCAGCCTACAAGCAGGGGCAGAA |
| | | CCAGCTCTACAACGAACTCAATCTTGGTCGGAGAGAGGAGTACGACGTGCTGG |
| | | ACAAGCGGAGAGGACGGGACCCAGAAATGGGCGGGAAGCCGCGCAGAAAGAAT |
| | | CCCCAAGAGGGCCTGTACAACGAGCTCCAAAAGGATAAGATGGCAGAAGCCTA |
| | | TAGCGAGATTGGTATGAAAGGGGAACGCAGAAGAGGCAAAGGCCACGACGGAC |
| | | TGTACCAGGGACTCAGCACCGCCACCAAGGACACCTATGACGCTCTTCACATG |
| | | CAGGCCCTGCCGCCTCGG |

139110

| | | |
|---|---|---|
| 139110- aa | 1033 | QVQLVQSGGGLVKPGGSLRLSCAASGFTFSDYYMSWIRQAPGKGLEWVSYISS |
| ScFv domain | | SGNTIYYADSVKGRFTISRDNAKNSLYLQMNSLRAEDTAVYYCARSTMVREDY |
| | | WGQGTLVTVSSASGGGGSGGRASGGGGSDIVLTQSPLSLPVTLGQPASISCKS |
| | | SESLVHNSGKTYLNWFHQRPGQSPRRLIYEVSNRDSGVPDRFTGSGSGTDFTL |
| | | KISRVEAEDVGVYYCMQGTHWPGTFGQGTKLEIK |
| 139110- nt | 1034 | CAAGTGCAACTGGTGCAAAGCGGAGGAGGATTGGTCAAACCCGGAGGAAGCCT |
| ScFv domain | | GAGACTGTCATGCGCGGCCTCTGGATTCACCTTCTCCGATTACTACATGTCAT |
| | | GGATCAGACAGGCCCCGGGGAAGGGCCTCGAATGGGTGTCCTACATCTCGTCC |
| | | TCCGGGAACACCATCTACTACGCCGACAGCGTGAAGGGCCGCTTTACCATTTC |
| | | CCGCGACAACGCAAAGAACTCGCTGTACCTTCAGATGAATTCCCTGCGGGCTG |
| | | AAGATACCGCGGTGTACTATTGCGCCCGGTCCACTATGGTCCGGGAGGACTAC |
| | | TGGGGACAGGGCACACTCGTGACCGTGTCCAGCGCGAGCGGGGGTGGAGGCAG |
| | | CGGTGGACGCGCCTCCGGCGGCGGCGGTTCAGACATCGTGCTGACTCAGTCGC |
| | | CCCTGTCGCTGCCGGTCACCCTGGGCCAACCGGCCTCAATTAGCTGCAAGTCC |
| | | TCGGAGAGCCTGGTGCACAACTCAGGAAAGACTTACCTGAACTGGTTCCATCA |
| | | GCGGCCTGGACAGTCCCCACGGAGGCTCATCTATGAAGTGTCCAACAGGGATT |
| | | CGGGGGTGCCCGACCGCTTCACTGGCTCCGGGTCCGGCACCGACTTCACCTTG |
| | | AAAATCTCCAGAGTGGAAGCCGAGGACGTGGGCGTGTACTACTGTATGCAGGG |
| | | TACCCACTGGCCTGGAACCTTTGGACAAGGAACTAAGCTCGAGATTAAG |
| 139110- aa | 1035 | QVQLVQSGGGLVKPGGSLRLSCAASGFTFSDYYMSWIRQAPGKGLEWVSYISS |
| VH | | SGNTIYYADSVKGRFTISRDNAKNSLYLQMNSLRAEDTAVYYCARSTMVREDY |
| | | WGQGTLVTVSS |
| 139110- aa | 1036 | DIVLTQSPLSLPVTLGQPASISCKSSESLVHNSGKTYLNWFHQRPGQSPRRLI |
| VL | | YEVSNRDSGVPDRFTGSGSGTDFTLKISRVEAEDVGVYYCMQGTHWPGTFGQG |
| | | TKLEIK |
| 139110- aa | 1037 | MALPVTALLLPLALLLHAARPQVQLVQSGGGLVKPGGSLRLSCAASGFTFSDY |
| Full CAR | | YMSWIRQAPGKGLEWVSYISSSGNTIYYADSVKGRFTISRDNAKNSLYLQMNS |
| | | LRAEDTAVYYCARSTMVREDYWGQGTLVTVSSASGGGGSGGRASGGGGSDIVL |
| | | TQSPLSLPVTLGQPASISCKSSESLVHNSGKTYLNWFHQRPGQSPRRLIYEVS |
| | | NRDSGVPDRFTGSGSGTDFTLKISRVEAEDVGVYYCMQGTHWPGTFGQGTKLE |
| | | IKTTTPAPRPPTPAPTIASQPLSLRPEACRPAAGGAVHTRGLDFACDIYIWAP |
| | | LAGTCGVLLLSLVITLYCKRGRKKLLYIFKQPFMRPVQTTQEEDGCSCRFPEE |
| | | EEGGCELRVKFSRSADAPAYKQGQNQLYNELNLGRREEYDVLDKRRGRDPEMG |
| | | GKPRRKNPQEGLYNELQKDKMAEAYSEIGMKGERRRGKGHDGLYQGLSTATKD |
| | | TYDALHMQALPPR |
| 139110- nt | 1038 | ATGGCCCTCCCTGTCACCGCCCTGCTGCTTCCGCTGGCTCTTCTGCTCCACGC |
| Full CAR | | CGCTCGGCCCCAAGTGCAACTGGTGCAAAGCGGAGGAGGATTGGTCAAACCCG |
| | | GAGGAAGCCTGAGACTGTCATGCGCGGCCTCTGGATTCACCTTCTCCGATTAC |
| | | TACATGTCATGGATCAGACAGGCCCCGGGGAAGGGCCTCGAATGGGTGTCCTA |
| | | CATCTCGTCCTCCGGGAACACCATCTACTACGCCGACAGCGTGAAGGGCCGCT |
| | | TTACCATTTCCCGCGACAACGCAAAGAACTCGCTGTACCTTCAGATGAATTCC |
| | | CTGCGGGCTGAAGATACCGCGGTGTACTATTGCGCCCGGTCCACTATGGTCCG |
| | | GGAGGACTACTGGGGACAGGGCACACTCGTGACCGTGTCCAGCGCGAGCGGGG |
| | | GTGGAGGCAGCGGTGGACGCGCCTCCGGCGGCGGCGGTTCAGACATCGTGCTG |
| | | ACTCAGTCGCCCCTGTCGCTGCCGGTCACCCTGGGCCAACCGGCCTCAATTAG |
| | | CTGCAAGTCCTCGGAGAGCCTGGTGCACAACTCAGGAAAGACTTACCTGAACT |
| | | GGTTCCATCAGCGGCCTGGACAGTCCCCACGGAGGCTCATCTATGAAGTGTCC |
| | | AACAGGGATTCGGGGGTGCCCGACCGCTTCACTGGCTCCGGGTCCGGCACCGA |
| | | CTTCACCTTGAAAATCTCCAGAGTGGAAGCCGAGGACGTGGGCGTGTACTACT |
| | | GTATGCAGGGTACCCACTGGCCTGGAACCTTTGGACAAGGAACTAAGCTCGAG |
| | | ATTAAGACCACTACCCCAGCACCGAGGCCACCCACCCCGGCTCCTACCATCGC |
| | | CTCCCAGCCTCTGTCCCTGCGTCCGGAGGCATGTAGACCCGCAGCTGGTGGGG |
| | | CCGTGCATACCCGGGGTCTTGACTTCGCCTGCGATATCTACATTTGGGCCCCT |
| | | CTGGCTGGTACTTGCGGGGTCCTGCTGCTTTCACTCGTGATCACTCTTTACTG |
| | | TAAGCGCGGTCGGAAGAAGCTGCTGTACATCTTTAAGCAACCCTTCATGAGGC |
| | | CTGTGCAGACTACTCAAGAGGAGGACGGCTGTTCATGCCGGTTCCCAGAGGAG |
| | | GAGGAAGGCGGCTGCGAACTGCGCGTGAAATTCAGCCGCAGCGCAGATGCTCC |
| | | AGCCTACAAGCAGGGGCAGAACCAGCTCTACAACGAACTCAATCTTGGTCGGA |
| | | GAGAGGAGTACGACGTGCTGGACAAGCGGAGAGGACGGGACCCAGAAATGGGC |
| | | GGGAAGCCGCGCAGAAAGAATCCCCAAGAGGGCCTGTACAACGAGCTCCAAAA |
| | | GGATAAGATGGCAGAAGCCTATAGCGAGATTGGTATGAAAGGGGAACGCAGAA |
| | | GAGGCAAAGGCCACGACGGACTGTACCAGGGACTCAGCACCGCCACCAAGGAC |
| | | ACCTATGACGCTCTTCACATGCAGGCCCTGCCGCCTCGG |

139112

| | | |
|---|---|---|
| 139112- aa | 1039 | QVQLVESGGGLVQPGGSLRLSCAVSGFALSNHGMSWVRRAPGKGLEWVSGIVY |
| ScFv domain | | SGSTYYAASVKGRFTISRDNSRNTLYLQMNSLRPEDTAIYYCSAHGGESDVWG |
| | | QGTTVTVSSASGGGGSGGRASGGGGSDIRLTQSPSPLSASVGDRVTITCQASE |
| | | DINKFLNWYHQTPGKAPKLLIYDASTLQTGVPSRFSGSGSGTDFTLTINSLQP |
| | | EDIGTYYCQQYESLPLTFGGGTKVEIK |
| 139112- nt | 1040 | CAAGTGCAACTCGTGGAATCTGGTGGAGGACTCGTGCAACCCGGTGGAAGCCT |
| ScFv domain | | TAGGCTGTCGTGCGCCGTCAGCGGGTTTGCTCTGAGCAACCATGGAATGTCCT |
| | | GGGTCCGCCGGGCACCGGGAAAAGGGCTGGAATGGGTGTCCGGCATCGTGTAC |
| | | AGCGGGTCAACCTATTACGCCGCGTCCGTGAAGGGCAGATTCACTATCTCAAG |
| | | AGACAACAGCCGGAACACCCTGTACTTGCAAATGAATTCCCTGCGCCCCGAGG |
| | | ACACCGCCATCTACTACTGCTCCGCCCACGGAGGAGAGTCGGACGTGTGGGGC |
| | | CAGGGAACGACTGTGACTGTGTCCAGCGCATCAGGAGGGGGTGGTTCGGGCGG |
| | | CCGGGCCTCGGGGGGAGGAGGTTCCGACATTCGGCTGACCCAGTCCCCGTCCC |
| | | CACTGTCGGCCTCCGTCGGCGACCGCGTGACCATCACTTGTCAGGCGTCCGAG |
| | | GACATTAACAAGTTCCTGAACTGGTACCACCAGACCCCTGGAAAGGCCCCCAA |
| | | GCTGCTGATCTACGATGCCTCGACCCTTCAAACTGGAGTGCCTAGCCGGTTCT |
| | | CCGGGTCCGGCTCCGGCACTGATTTCACTCTGACCATCAACTCATTGCAGCCG |
| | | GAAGATATCGGGACCTACTATTGCCAGCAGTACGAATCCCTCCCGCTCACATT |
| | | CGGCGGGGGAACCAAGGTCGAGATTAAG |
| 139112- aa | 1041 | QVQLVESGGGLVQPGGSLRLSCAVSGFALSNHGMSWVRRAPGKGLEWVSGIVY |
| VH | | SGSTYYAASVKGRFTISRDNSRNTLYLQMNSLRPEDTAIYYCSAHGGESDVWG |
| | | QGTTVTVSS |
| 139112- aa | 1042 | DIRLTQSPSPLSASVGDRVTITCQASEDINKFLNWYHQTPGKAPKLLIYDAST |
| VL | | LQTGVPSRFSGSGSGTDFTLTINSLQPEDIGTYYCQQYESLPLTFGGGTKVEI |
| | | K |
| 139112- aa | 1043 | MALPVTALLLPLALLLHAARPQVQLVESGGGLVQPGGSLRLSCAVSGFALSNH |
| Full CAR | | GMSWVRRAPGKGLEWVSGIVYSGSTYYAASVKGRFTISRDNSRNTLYLQMNSL |
| | | RPEDTAIYYCSAHGGESDVWGQGTTVTVSSASGGGGSGGRASGGGGSDIRLTQ |
| | | SPSPLSASVGDRVTITCQASEDINKFLNWYHQTPGKAPKLLIYDASTLQTGVP |
| | | SRFSGSGSGTDFTLTINSLQPEDIGTYYCQQYESLPLTFGGGTKVEIKTTTPA |
| | | PRPPTPAPTIASQPLSLRPEACRPAAGGAVHTRGLDFACDIYIWAPLAGTCGV |
| | | LLLSLVITLYCKRGRKKLLYIFKQPFMRPVQTTQEEDGCSCRFPEEEEGGCEL |
| | | RVKFSRSADAPAYKQGQNQLYNELNLGRREEYDVLDKRRGRDPEMGGKPRRKN |
| | | PQEGLYNELQKDKMAEAYSEIGMKGERRRGKGHDGLYQGLSTATKDTYDALHM |
| | | QALPPR |
| 139112- nt | 1044 | ATGGCCCTCCCTGTCACCGCCCTGCTGCTTCCGCTGGCTCTTCTGCTCCACGC |
| Full CAR | | CGCTCGGCCCCAAGTGCAACTCGTGGAATCTGGTGGAGGACTCGTGCAACCCG |
| | | GTGGAAGCCTTAGGCTGTCGTGCGCCGTCAGCGGGTTTGCTCTGAGCAACCAT |
| | | GGAATGTCCTGGGTCCGCCGGGCACCGGGAAAAGGGCTGGAATGGGTGTCCGG |
| | | CATCGTGTACAGCGGGTCAACCTATTACGCCGCGTCCGTGAAGGGCAGATTCA |
| | | CTATCTCAAGAGACAACAGCCGGAACACCCTGTACTTGCAAATGAATTCCCTG |
| | | CGCCCCGAGGACACCGCCATCTACTACTGCTCCGCCCACGGAGGAGAGTCGGA |
| | | CGTGTGGGGCCAGGGAACGACTGTGACTGTGTCCAGCGCATCAGGAGGGGGTG |
| | | GTTCGGGCGGCCGGGCCTCGGGGGGAGGAGGTTCCGACATTCGGCTGACCCAG |
| | | TCCCCGTCCCCACTGTCGGCCTCCGTCGGCGACCGCGTGACCATCACTTGTCA |
| | | GGCGTCCGAGGACATTAACAAGTTCCTGAACTGGTACCACCAGACCCCTGGAA |
| | | AGGCCCCCAAGCTGCTGATCTACGATGCCTCGACCCTTCAAACTGGAGTGCCT |
| | | AGCCGGTTCTCCGGGTCCGGCTCCGGCACTGATTTCACTCTGACCATCAACTC |
| | | ATTGCAGCCGGAAGATATCGGGACCTACTATTGCCAGCAGTACGAATCCCTCC |
| | | CGCTCACATTCGGCGGGGGAACCAAGGTCGAGATTAAGACCACTACCCCAGCA |
| | | CCGAGGCCACCCACCCCGGCTCCTACCATCGCCTCCCAGCCTCTGTCCCTGCG |
| | | TCCGGAGGCATGTAGACCCGCAGCTGGTGGGGCCGTGCATACCCGGGGTCTTG |
| | | ACTTCGCCTGCGATATCTACATTTGGGCCCCTCTGGCTGGTACTTGCGGGGTC |
| | | CTGCTGCTTTCACTCGTGATCACTCTTTACTGTAAGCGCGGTCGGAAGAAGCT |
| | | GCTGTACATCTTTAAGCAACCCTTCATGAGGCCTGTGCAGACTACTCAAGAGG |
| | | AGGACGGCTGTTCATGCCGGTTCCCAGAGGAGGAGGAAGGCGGCTGCGAACTG |
| | | CGCGTGAAATTCAGCCGCAGCGCAGATGCTCCAGCCTACAAGCAGGGGCAGAA |
| | | CCAGCTCTACAACGAACTCAATCTTGGTCGGAGAGAGGAGTACGACGTGCTGG |
| | | ACAAGCGGAGAGGACGGGACCCAGAAATGGGCGGGAAGCCGCGCAGAAAGAAT |
| | | CCCCAAGAGGGCCTGTACAACGAGCTCCAAAAGGATAAGATGGCAGAAGCCTA |
| | | TAGCGAGATTGGTATGAAAGGGGAACGCAGAAGAGGCAAAGGCCACGACGGAC |
| | | TGTACCAGGGACTCAGCACCGCCACCAAGGACACCTATGACGCTCTTCACATG |
| | | CAGGCCCTGCCGCCTCGG |

139113

| | | |
|---|---|---|
| 139113- aa | 1045 | EVQLVETGGGLVQPGGSLRLSCAVSGFALSNHGMSWVRRAPGKGLEWVSGIVY |
| ScFv domain | | SGSTYYAASVKGRFTISRDNSRNTLYLQMNSLRPEDTAIYYCSAHGGESDVWG |
| | | QGTTVTVSSASGGGGSGGRASGGGGSETTLTQSPATLSVSPGERATLSCRASQ |
| | | SVGSNLAWYQQKPGQGPRLLIYGASTRATGIPARFSGSGSGTEFTLTISSLQP |
| | | EDFAVYYCQQYNDWLPVTFGQGTKVEIK |
| 139113- nt | 1046 | GAAGTGCAATTGGTGGAAACTGGAGGAGGACTTGTGCAACCTGGAGGATCATT |
| ScFv domain | | GCGGCTCTCATGCGCTGTCTCCGGCTTCGCCCTGTCAAATCACGGGATGTCGT |
| | | GGGTCAGACGGGCCCCGGGAAAGGGTCTGGAATGGGTGTCGGGGATTGTGTAC |
| | | AGCGGCTCCACCTACTACGCCGCTTCGGTCAAGGGCCGCTTCACTATTTCACG |
| | | GGACAACAGCCGCAACACCCTCTATCTGCAAATGAACTCTCTCCGCCCGGAGG |
| | | ATACCGCCATCTACTACTGCTCCGCACACGGCGGCGAATCCGACGTGTGGGGA |
| | | CAGGGAACCACTGTCACCGTGTCGTCCGCATCCGGTGGCGGAGGATCGGGTGG |
| | | CCGGGCCTCCGGGGGCGGCGGCAGCGAGACTACCCTGACCCAGTCCCCTGCCA |
| | | CTCTGTCCGTGAGCCCGGGAGAGAGAGCCACCCTTAGCTGCCGGGCCAGCCAG |
| | | AGCGTGGGCTCCAACCTGGCCTGGTACCAGCAGAAGCCAGGACAGGGTCCCAG |
| | | GCTGCTGATCTACGGAGCCTCCACTCGCGCGACCGGCATCCCCGCGAGGTTCT |
| | | CCGGGTCGGGTTCCGGGACCGAGTTCACCCTGACCATCTCCTCCCTCCAACCG |
| | | GAGGACTTCGCGGTGTACTACTGTCAGCAGTACAACGATTGGCTGCCCGTGAC |
| | | ATTTGGACAGGGGACGAAGGTGGAAATCAAA |
| 139113- aa | 1047 | EVQLVETGGGLVQPGGSLRLSCAVSGFALSNHGMSWVRRAPGKGLEWVSGIVY |
| VH | | SGSTYYAASVKGRFTISRDNSRNTLYLQMNSLRPEDTAIYYCSAHGGESDVWG |
| | | QGTTVTVSS |
| 139113- aa | 1048 | ETTLTQSPATLSVSPGERATLSCRASQSVGSNLAWYQQKPGQGPRLLIYGAST |
| VL | | RATGIPARFSGSGSGTEFTLTISSLQPEDFAVYYCQQYNDWLPVTFGQGTKVE |
| | | IK |
| 139113- aa | 1049 | MALPVTALLLPLALLLHAARPEVQLVETGGGLVQPGGSLRLSCAVSGFALSNH |
| Full CAR | | GMSWVRRAPGKGLEWVSGIVYSGSTYYAASVKGRFTISRDNSRNTLYLQMNSL |
| | | RPEDTAIYYCSAHGGESDVWGQGTTVTVSSASGGGGSGGRASGGGGSETTLTQ |
| | | SPATLSVSPGERATLSCRASQSVGSNLAWYQQKPGQGPRLLIYGASTRATGIP |
| | | ARFSGSGSGTEFTLTISSLQPEDFAVYYCQQYNDWLPVTFGQGTKVEIKTTTP |
| | | APRPPTPAPTIASQPLSLRPEACRPAAGGAVHTRGLDFACDIYIWAPLAGTCG |
| | | VLLLSLVITLYCKRGRKKLLYIFKQPFMRPVQTTQEEDGCSCRFPEEEEGGCE |
| | | LRVKFSRSADAPAYKQGQNQLYNELNLGRREEYDVLDKRRGRDPEMGGKPRRK |
| | | NPQEGLYNELQKDKMAEAYSEIGMKGERRRGKGHDGLYQGLSTATKDTYDALH |
| | | MQALPPR |
| 139113- nt | 1050 | ATGGCCCTCCCTGTCACCGCCCTGCTGCTTCCGCTGGCTCTTCTGCTCCACGC |
| Full CAR | | CGCTCGGCCCGAAGTGCAATTGGTGGAAACTGGAGGAGGACTTGTGCAACCTG |
| | | GAGGATCATTGCGGCTCTCATGCGCTGTCTCCGGCTTCGCCCTGTCAAATCAC |
| | | GGGATGTCGTGGGTCAGACGGGCCCCGGGAAAGGGTCTGGAATGGGTGTCGGG |
| | | GATTGTGTACAGCGGCTCCACCTACTACGCCGCTTCGGTCAAGGGCCGCTTCA |
| | | CTATTTCACGGGACAACAGCCGCAACACCCTCTATCTGCAAATGAACTCTCTC |
| | | CGCCCGGAGGATACCGCCATCTACTACTGCTCCGCACACGGCGGCGAATCCGA |
| | | CGTGTGGGGACAGGGAACCACTGTCACCGTGTCGTCCGCATCCGGTGGCGGAG |
| | | GATCGGGTGGCCGGGCCTCCGGGGGCGGCGGCAGCGAGACTACCCTGACCCAG |
| | | TCCCCTGCCACTCTGTCCGTGAGCCCGGGAGAGAGAGCCACCCTTAGCTGCCG |
| | | GGCCAGCCAGAGCGTGGGCTCCAACCTGGCCTGGTACCAGCAGAAGCCAGGAC |
| | | AGGGTCCCAGGCTGCTGATCTACGGAGCCTCCACTCGCGCGACCGGCATCCCC |
| | | GCGAGGTTCTCCGGGTCGGGTTCCGGGACCGAGTTCACCCTGACCATCTCCTC |
| | | CCTCCAACCGGAGGACTTCGCGGTGTACTACTGTCAGCAGTACAACGATTGGC |
| | | TGCCCGTGACATTTGGACAGGGGACGAAGGTGGAAATCAAAACCACTACCCCA |
| | | GCACCGAGGCCACCCACCCCGGCTCCTACCATCGCCTCCCAGCCTCTGTCCCT |
| | | GCGTCCGGAGGCATGTAGACCCGCAGCTGGTGGGGCCGTGCATACCCGGGGTC |
| | | TTGACTTCGCCTGCGATATCTACATTTGGGCCCCTCTGGCTGGTACTTGCGGG |
| | | GTCCTGCTGCTTTCACTCGTGATCACTCTTTACTGTAAGCGCGGTCGGAAGAA |
| | | GCTGCTGTACATCTTTAAGCAACCCTTCATGAGGCCTGTGCAGACTACTCAAG |
| | | AGGAGGACGGCTGTTCATGCCGGTTCCCAGAGGAGGAGGAAGGCGGCTGCGAA |
| | | CTGCGCGTGAAATTCAGCCGCAGCGCAGATGCTCCAGCCTACAAGCAGGGGCA |
| | | GAACCAGCTCTACAACGAACTCAATCTTGGTCGGAGAGAGGAGTACGACGTGC |
| | | TGGACAAGCGGAGAGGACGGGACCCAGAAATGGGCGGGAAGCCGCGCAGAAAG |
| | | AATCCCCAAGAGGGCCTGTACAACGAGCTCCAAAAGGATAAGATGGCAGAAGC |
| | | CTATAGCGAGATTGGTATGAAAGGGGAACGCAGAAGAGGCAAAGGCCACGACG |
| | | GACTGTACCAGGGACTCAGCACCGCCACCAAGGACACCTATGACGCTCTTCAC |
| | | ATGCAGGCCCTGCCGCCTCGG |

139114

| | | |
|---|---|---|
| 139114- aa | 1051 | EVQLVESGGGLVQPGGSLRLSCAVSGFALSNHGMSWVRRAPGKGLEWVSGIVY |
| ScFv domain | | SGSTYYAASVKGRFTISRDNSRNTLYLQMNSLRPEDTAIYYCSAHGGESDVWG |
| | | QGTTVTVSSASGGGGSGGRASGGGGSEIVLTQSPGTLSLSPGERATLSCRASQ |
| | | SIGSSSLAWYQQKPGQAPRLLMYGASSRASGIPDRFSGSGSGTDFTLTISRLE |
| | | PEDFAVYYCQQYAGSPPFTFGQGTKVEIK |
| 139114- nt | 1052 | GAAGTGCAATTGGTGGAATCTGGTGGAGGACTTGTGCAACCTGGAGGATCACT |
| ScFv domain | | GAGACTGTCATGCGCGGTGTCCGGTTTTGCCCTGAGCAATCATGGGATGTCGT |
| | | GGGTCCGGCGCGCCCCCGGAAAGGGTCTGGAATGGGTGTCGGGTATCGTCTAC |
| | | TCCGGGAGCACTTACTACGCCGCGAGCGTGAAGGGCCGCTTCACCATTTCCCG |
| | | CGATAACTCCCGCAACACCCTGTACTTGCAAATGAACTCGCTCCGGCCTGAGG |
| | | ACACTGCCATCTACTACTGCTCCGCACACGGAGGAGAATCCGACGTGTGGGGC |
| | | CAGGGAACTACCGTGACCGTCAGCAGCGCCTCCGGCGGCGGGGGCTCAGGCGG |
| | | ACGGGCTAGCGGCGGCGGTGGCTCCGAGATCGTGCTGACCCAGTCGCCTGGCA |
| | | CTCTCTCGCTGAGCCCCGGGGAAAGGGCAACCCTGTCCTGTCGGGCCAGCCAG |
| | | TCCATTGGATCATCCTCCCTCGCCTGGTATCAGCAGAAACCGGGACAGGCTCC |
| | | GCGGCTGCTTATGTATGGGGCCAGCTCAAGAGCCTCCGGCATTCCCGACCGGT |
| | | TCTCCGGGTCCGGTTCCGGCACCGATTTCACCCTGACTATCTCGAGGCTGGAG |
| | | CCAGAGGACTTCGCCGTGTACTACTGCCAGCAGTACGCGGGGTCCCCGCCGTT |
| | | CACGTTCGGACAGGGAACCAAGGTCGAGATCAAG |
| 139114- aa | 1053 | EVQLVESGGGLVQPGGSLRLSCAVSGFALSNHGMSWVRRAPGKGLEWVSGIVY |
| VH | | SGSTYYAASVKGRFTISRDNSRNTLYLQMNSLRPEDTAIYYCSAHGGESDVWG |
| | | QGTTVTVSS |
| 139114- aa | 1054 | EIVLTQSPGTLSLSPGERATLSCRASQSIGSSSLAWYQQKPGQAPRLLMYGAS |
| VL | | SRASGIPDRFSGSGSGTDFTLTISRLEPEDFAVYYCQQYAGSPPFTFGQGTKV |
| | | EIK |
| 139114- aa | 1055 | MALPVTALLLPLALLLHAARPEVQLVESGGGLVQPGGSLRLSCAVSGFALSNH |
| Full CAR | | GMSWVRRAPGKGLEWVSGIVYSGSTYYAASVKGRFTISRDNSRNTLYLQMNSL |
| | | RPEDTAIYYCSAHGGESDVWGQGTTVTVSSASGGGGSGGRASGGGGSEIVLTQ |
| | | SPGTLSLSPGERATLSCRASQSIGSSSLAWYQQKPGQAPRLLMYGASSRASGI |
| | | PDRFSGSGSGTDFTLTISRLEPEDFAVYYCQQYAGSPPFTFGQGTKVEIKTTT |
| | | PAPRPPTPAPTIASQPLSLRPEACRPAAGGAVHTRGLDFACDIYIWAPLAGTC |
| | | GVLLLSLVITLYCKRGRKKLLYIFKQPFMRPVQTTQEEDGCSCRFPEEEEGGC |
| | | ELRVKFSRSADAPAYKQGQNQLYNELNLGRREEYDVLDKRRGRDPEMGGKPRR |
| | | KNPQEGLYNELQKDKMAEAYSEIGMKGERRRGKGHDGLYQGLSTATKDTYDAL |
| | | HMQALPPR |
| 139114- nt | 1056 | ATGGCCCTCCCTGTCACCGCCCTGCTGCTTCCGCTGGCTCTTCTGCTCCACGC |
| Full CAR | | CGCTCGGCCCGAAGTGCAATTGGTGGAATCTGGTGGAGGACTTGTGCAACCTG |
| | | GAGGATCACTGAGACTGTCATGCGCGGTGTCCGGTTTTGCCCTGAGCAATCAT |
| | | GGGATGTCGTGGGTCCGGCGCGCCCCCGGAAAGGGTCTGGAATGGGTGTCGGG |
| | | TATCGTCTACTCCGGGAGCACTTACTACGCCGCGAGCGTGAAGGGCCGCTTCA |
| | | CCATTTCCCGCGATAACTCCCGCAACACCCTGTACTTGCAAATGAACTCGCTC |
| | | CGGCCTGAGGACACTGCCATCTACTACTGCTCCGCACACGGAGGAGAATCCGA |
| | | CGTGTGGGGCCAGGGAACTACCGTGACCGTCAGCAGCGCCTCCGGCGGCGGGG |
| | | GCTCAGGCGGACGGGCTAGCGGCGGCGGTGGCTCCGAGATCGTGCTGACCCAG |
| | | TCGCCTGGCACTCTCTCGCTGAGCCCCGGGGAAAGGGCAACCCTGTCCTGTCG |
| | | GGCCAGCCAGTCCATTGGATCATCCTCCCTCGCCTGGTATCAGCAGAAACCGG |
| | | GACAGGCTCCGCGGCTGCTTATGTATGGGGCCAGCTCAAGAGCCTCCGGCATT |
| | | CCCGACCGGTTCTCCGGGTCCGGTTCCGGCACCGATTTCACCCTGACTATCTC |
| | | GAGGCTGGAGCCAGAGGACTTCGCCGTGTACTACTGCCAGCAGTACGCGGGGT |
| | | CCCCGCCGTTCACGTTCGGACAGGGAACCAAGGTCGAGATCAAGACCACTACC |
| | | CCAGCACCGAGGCCACCCACCCCGGCTCCTACCATCGCCTCCCAGCCTCTGTC |
| | | CCTGCGTCCGGAGGCATGTAGACCCGCAGCTGGTGGGGCCGTGCATACCCGGG |
| | | GTCTTGACTTCGCCTGCGATATCTACATTTGGGCCCCTCTGGCTGGTACTTGC |
| | | GGGGTCCTGCTGCTTTCACTCGTGATCACTCTTTACTGTAAGCGCGGTCGGAA |
| | | GAAGCTGCTGTACATCTTTAAGCAACCCTTCATGAGGCCTGTGCAGACTACTC |
| | | AAGAGGAGGACGGCTGTTCATGCCGGTTCCCAGAGGAGGAGGAAGGCGGCTGC |
| | | GAACTGCGCGTGAAATTCAGCCGCAGCGCAGATGCTCCAGCCTACAAGCAGGG |
| | | GCAGAACCAGCTCTACAACGAACTCAATCTTGGTCGGAGAGAGGAGTACGACG |
| | | TGCTGGACAAGCGGAGAGGACGGGACCCAGAAATGGGCGGGAAGCCGCGCAGA |
| | | AAGAATCCCCAAGAGGGCCTGTACAACGAGCTCCAAAAGGATAAGATGGCAGA |
| | | AGCCTATAGCGAGATTGGTATGAAAGGGGAACGCAGAAGAGGCAAAGGCCACG |
| | | ACGGACTGTACCAGGGACTCAGCACCGCCACCAAGGACACCTATGACGCTCTT |
| | | CACATGCAGGCCCTGCCGCCTCGG |

149362

| | | |
|---|---|---|
| 149362-aa | 1057 | QVQLQESGPGLVKPSETLSLTCTVSGGSISSSYYYWGWIRQPPGKGLEWIGSI |
| ScFv domain | | YYSGSAYYNPSLKSRVTISVDTSKNQFSLRLSSVTAADTAVYYCARHWQEWPD |
| | | AFDIWGQGTMVTVSSGGGGSGGGGSGGGGSETTLTQSPAFMSATPGDKVIISC |
| | | KASQDIDDAMNWYQQKPGEAPLFIIQSATSPVPGIPPRFSGSGFGTDFSLTIN |
| | | NIESEDAAYYFCLQHDNFPLTFGQGTKLEIK |
| 149362-nt ScFv | 1058 | CAAGTGCAGCTTCAGGAAAGCGGACCGGGCCTGGTCAAGCCATCCGAAACTCT |
| domain | | CTCCCTGACTTGCACTGTGTCTGGCGGTTCCATCTCATCGTCGTACTACTACT |
| | | GGGGCTGGATTAGGCAGCCGCCCGGAAAGGGACTGGAGTGGATCGGAAGCATC |
| | | TACTATTCCGGCTCGGCGTACTACAACCCTAGCCTCAAGTCGAGAGTGACCAT |
| | | CTCCGTGGATACCTCCAAGAACCAGTTTTCCCTGCGCCTGAGCTCCGTGACCG |
| | | CCGCTGACACCGCCGTGTACTACTGTGCTCGGCATTGGCAGGAATGGCCCGAT |
| | | GCCTTCGACATTTGGGGCCAGGGCACTATGGTCACTGTGTCATCCGGGGGTGG |
| | | AGGCAGCGGGGGAGGAGGGTCCGGGGGGGGAGGTTCAGAGACAACCTTGACCC |
| | | AGTCACCCGCATTCATGTCCGCCACTCCGGGAGACAAGGTCATCATCTCGTGC |
| | | AAAGCGTCCCAGGATATCGACGATGCCATGAATTGGTACCAGCAGAAGCCTGG |
| | | CGAAGCGCCGCTGTTCATTATCCAATCCGCAACCTCGCCCGTGCCTGGAATCC |
| | | CACCGCGGTTCAGCGGCAGCGGTTTCGGAACCGACTTTTCCCTGACCATTAAC |
| | | AACATTGAGTCCGAGGACGCCGCCTACTACTTCTGCCTGCAACACGACAACTT |
| | | CCCTCTCACGTTCGGCCAGGGAACCAAGCTGGAAATCAAG |
| 149362-aa VH | 1059 | QVQLQESGPGLVKPSETLSLTCTVSGGSISSSYYYWGWIRQPPGKGLEWIGSI |
| | | YYSGSAYYNPSLKSRVTISVDTSKNQFSLRLSSVTAADTAVYYCARHWQEWPD |
| | | AFDIWGQGTMVTVSS |
| 149362-aa VL | 1060 | ETTLTQSPAFMSATPGDKVIISCKASQDIDDAMNWYQQKPGEAPLFIIQSATS |
| | | PVPGIPPRFSGSGFGTDFSLTINNIESEDAAYYFCLQHDNFPLTFGQGTKLEI |
| | | K |
| 149362-aa Full | 1061 | MALPVTALLLPLALLLHAARPQVQLQESGPGLVKPSETLSLTCTVSGGSISSS |
| CAR | | YYYWGWIRQPPGKGLEWIGSIYYSGSAYYNPSLKSRVTISVDTSKNQFSLRLS |
| | | SVTAADTAVYYCARHWQEWPDAFDIWGQGTMVTVSSGGGGSGGGGSGGGGSET |
| | | TLTQSPAFMSATPGDKVIISCKASQDIDDAMNWYQQKPGEAPLFIIQSATSPV |
| | | PGIPPRFSGSGFGTDFSLTINNIESEDAAYYFCLQHDNFPLTFGQGTKLEIKT |
| | | TTPAPRPPTPAPTIASQPLSLRPEACRPAAGGAVHTRGLDFACDIYIWAPLAG |
| | | TCGVLLLSLVITLYCKRGRKKLLYIFKQPFMRPVQTTQEEDGCSCRFPEEEEG |
| | | GCELRVKFSRSADAPAYKQGQNQLYNELNLGRREEYDVLDKRRGRDPEMGGKP |
| | | RRKNPQEGLYNELQKDKMAEAYSEIGMKGERRRGKGHDGLYQGLSTATKDTYD |
| | | ALHMQALPPR |
| 149362-nt | 1062 | ATGGCCCTCCCTGTCACCGCCCTGCTGCTTCCGCTGGCTCTTCTGCTCCACGC |
| Full CAR | | CGCTCGGCCCCAAGTGCAGCTTCAGGAAAGCGGACCGGGCCTGGTCAAGCCAT |
| | | CCGAAACTCTCTCCCTGACTTGCACTGTGTCTGGCGGTTCCATCTCATCGTCG |
| | | TACTACTACTGGGGCTGGATTAGGCAGCCGCCCGGAAAGGGACTGGAGTGGAT |
| | | CGGAAGCATCTACTATTCCGGCTCGGCGTACTACAACCCTAGCCTCAAGTCGA |
| | | GAGTGACCATCTCCGTGGATACCTCCAAGAACCAGTTTTCCCTGCGCCTGAGC |
| | | TCCGTGACCGCCGCTGACACCGCCGTGTACTACTGTGCTCGGCATTGGCAGGA |
| | | ATGGCCCGATGCCTTCGACATTTGGGGCCAGGGCACTATGGTCACTGTGTCAT |
| | | CCGGGGGTGGAGGCAGCGGGGGAGGAGGGTCCGGGGGGGGAGGTTCAGAGACA |
| | | ACCTTGACCCAGTCACCCGCATTCATGTCCGCCACTCCGGGAGACAAGGTCAT |
| | | CATCTCGTGCAAAGCGTCCCAGGATATCGACGATGCCATGAATTGGTACCAGC |
| | | AGAAGCCTGGCGAAGCGCCGCTGTTCATTATCCAATCCGCAACCTCGCCCGTG |
| | | CCTGGAATCCCACCGCGGTTCAGCGGCAGCGGTTTCGGAACCGACTTTTCCCT |
| | | GACCATTAACAACATTGAGTCCGAGGACGCCGCCTACTACTTCTGCCTGCAAC |
| | | ACGACAACTTCCCTCTCACGTTCGGCCAGGGAACCAAGCTGGAAATCAAGACC |
| | | ACTACCCCAGCACCGAGGCCACCCACCCCGGCTCCTACCATCGCCTCCCAGCC |
| | | TCTGTCCCTGCGTCCGGAGGCATGTAGACCCGCAGCTGGTGGGGCCGTGCATA |
| | | CCCGGGGTCTTGACTTCGCCTGCGATATCTACATTTGGGCCCCTCTGGCTGGT |
| | | ACTTGCGGGGTCCTGCTGCTTTCACTCGTGATCACTCTTTACTGTAAGCGCGG |
| | | TCGGAAGAAGCTGCTGTACATCTTTAAGCAACCCTTCATGAGGCCTGTGCAGA |
| | | CTACTCAAGAGGAGGACGGCTGTTCATGCCGGTTCCCAGAGGAGGAGGAAGGC |
| | | GGCTGCGAACTGCGCGTGAAATTCAGCCGCAGCGCAGATGCTCCAGCCTACAA |
| | | GCAGGGGCAGAACCAGCTCTACAACGAACTCAATCTTGGTCGGAGAGAGGAGT |
| | | ACGACGTGCTGGACAAGCGGAGAGGACGGGACCCAGAAATGGGCGGGAAGCCG |
| | | CGCAGAAAGAATCCCCAAGAGGGCCTGTACAACGAGCTCCAAAAGGATAAGAT |
| | | GGCAGAAGCCTATAGCGAGATTGGTATGAAAGGGGAACGCAGAAGAGGCAAAG |
| | | GCCACGACGGACTGTACCAGGGACTCAGCACCGCCACCAAGGACACCTATGAC |
| | | GCTCTTCACATGCAGGCCCTGCCGCCTCGG |

149363

| | | |
|---|---|---|
| 149363-aa | 1063 | VNLRESGPALVKPTQTLTLTCTFSGFSLRTSGMCVSWIRQPPGKALEWLARID |
| ScFv domain | | WDEDKFYSTSLKTRLTISKDTSDNQVVLRMTNMDPADTATYYCARSGAGGTSA |
| | | TAFDIWGPGTMVTVSSGGGGSGGGGSGGGGSDIQMTQSPSSLSASVGDRVTIT |
| | | CRASQDIYNNLAWFQLKPGSAPRSLMYAANKSQSGVPSRFSGSASGTDFTLTI |
| | | SSLQPEDFATYYCQHYYRFPYSFGQGTKLEIK |
| 149363-nt ScFv | 1064 | CAAGTCAATCTGCGCGAATCCGGCCCCGCCTTGGTCAAGCCTACCCAGACCCT |
| domain | | CACTCTGACCTGTACTTTCTCCGGCTTCTCCCTGCGGACTTCCGGGATGTGCG |
| | | TGTCCTGGATCAGACAGCCTCCGGGAAAGGCCCTGGAGTGGCTCGCTCGCATT |
| | | GACTGGGATGAGGACAAGTTCTACTCCACCTCACTCAAGACCAGGCTGACCAT |
| | | CAGCAAAGATACCTCTGACAACCAAGTGGTGCTCCGCATGACCAACATGGACC |
| | | CAGCCGACACTGCCACTTACTACTGCGCGAGGAGCGGAGCGGGCGGAACCTCC |
| | | GCCACCGCCTTCGATATTTGGGGCCCGGGTACCATGGTCACCGTGTCAAGCGG |
| | | AGGAGGGGGGTCCGGGGGCGGCGGTTCCGGGGGAGGCGGATCGGACATTCAGA |
| | | TGACTCAGTCACCATCGTCCCTGAGCGCTAGCGTGGGCGACAGAGTGACAATC |
| | | ACTTGCCGGGCATCCCAGGACATCTATAACAACCTTGCGTGGTTCCAGCTGAA |
| | | GCCTGGTTCCGCACCGCGGTCACTTATGTACGCCGCCAACAAGAGCCAGTCGG |
| | | GAGTGCCGTCCCGGTTTTCCGGTTCGGCCTCGGGAACTGACTTCACCCTGACG |
| | | ATCTCCAGCCTGCAACCCGAGGATTTCGCCACCTACTACTGCCAGCACTACTA |
| | | CCGCTTTCCCTACTCGTTCGGACAGGGAACCAAGCTGGAAATCAAG |
| 149363-aa VH | 1065 | QVNLRESGPALVKPTQTLTLTCTFSGFSLRTSGMCVSWIRQPPGKALEWLARI |
| | | DWDEDKFYSTSLKTRLTISKDTSDNQVVLRMTNMDPADTATYYCARSGAGGTS |
| | | ATAFDIWGPGTMVTVSS |
| 149363-aa VL | 1066 | DIQMTQSPSSLSASVGDRVTITCRASQDIYNNLAWFQLKPGSAPRSLMYAANK |
| | | SQSGVPSRFSGSASGTDFTLTISSLQPEDFATYYCQHYYRFPYSFGQGTKLEI |
| | | K |
| 149363-aa Full | 1067 | MALPVTALLLPLALLLHAARPQVNLRESGPALVKPTQTLTLTCTFSGFSLRTS |
| CAR | | GMCVSWIRQPPGKALEWLARIDWDEDKFYSTSLKTRLTISKDTSDNQVVLRMT |
| | | NMDPADTATYYCARSGAGGTSATAFDIWGPGTMVTVSSGGGGSGGGGSGGGGS |
| | | DIQMTQSPSSLSASVGDRVTITCRASQDIYNNLAWFQLKPGSAPRSLMYAANK |
| | | SQSGVPSRFSGSASGTDFTLTISSLQPEDFATYYCQHYYRFPYSFGQGTKLEI |
| | | KTTTPAPRPPTPAPTIASQPLSLRPEACRPAAGGAVHTRGLDFACDIYIWAPL |
| | | AGTCGVLLLSLVITLYCKRGRKKLLYIFKQPFMRPVQTTQEEDGCSCRFPEEE |
| | | EGGCELRVKFSRSADAPAYKQGQNQLYNELNLGRREEYDVLDKRRGRDPEMGG |
| | | KPRRKNPQEGLYNELQKDKMAEAYSEIGMKGERRRGKGHDGLYQGLSTATKDT |
| | | YDALHMQALPPR |
| 149363-nt | 1068 | ATGGCCCTCCCTGTCACCGCCCTGCTGCTTCCGCTGGCTCTTCTGCTCCACGC |
| Full CAR | | CGCTCGGCCCCAAGTCAATCTGCGCGAATCCGGCCCCGCCTTGGTCAAGCCTA |
| | | CCCAGACCCTCACTCTGACCTGTACTTTCTCCGGCTTCTCCCTGCGGACTTCC |
| | | GGGATGTGCGTGTCCTGGATCAGACAGCCTCCGGGAAAGGCCCTGGAGTGGCT |
| | | CGCTCGCATTGACTGGGATGAGGACAAGTTCTACTCCACCTCACTCAAGACCA |
| | | GGCTGACCATCAGCAAAGATACCTCTGACAACCAAGTGGTGCTCCGCATGACC |
| | | AACATGGACCCAGCCGACACTGCCACTTACTACTGCGCGAGGAGCGGAGCGGG |
| | | CGGAACCTCCGCCACCGCCTTCGATATTTGGGGCCCGGGTACCATGGTCACCG |
| | | TGTCAAGCGGAGGAGGGGGGTCCGGGGGCGGCGGTTCCGGGGGAGGCGGATCG |
| | | GACATTCAGATGACTCAGTCACCATCGTCCCTGAGCGCTAGCGTGGGCGACAG |
| | | AGTGACAATCACTTGCCGGGCATCCCAGGACATCTATAACAACCTTGCGTGGT |
| | | TCCAGCTGAAGCCTGGTTCCGCACCGCGGTCACTTATGTACGCCGCCAACAAG |
| | | AGCCAGTCGGGAGTGCCGTCCCGGTTTTCCGGTTCGGCCTCGGGAACTGACTT |
| | | CACCCTGACGATCTCCAGCCTGCAACCCGAGGATTTCGCCACCTACTACTGCC |
| | | AGCACTACTACCGCTTTCCCTACTCGTTCGGACAGGGAACCAAGCTGGAAATC |
| | | AAGACCACTACCCCAGCACCGAGGCCACCCACCCCGGCTCCTACCATCGCCTC |
| | | CCAGCCTCTGTCCCTGCGTCCGGAGGCATGTAGACCCGCAGCTGGTGGGGCCG |
| | | TGCATACCCGGGGTCTTGACTTCGCCTGCGATATCTACATTTGGGCCCCTCTG |
| | | GCTGGTACTTGCGGGGTCCTGCTGCTTTCACTCGTGATCACTCTTTACTGTAA |
| | | GCGCGGTCGGAAGAAGCTGCTGTACATCTTTAAGCAACCCTTCATGAGGCCTG |
| | | TGCAGACTACTCAAGAGGAGGACGGCTGTTCATGCCGGTTCCCAGAGGAGGAG |
| | | GAAGGCGGCTGCGAACTGCGCGTGAAATTCAGCCGCAGCGCAGATGCTCCAGC |
| | | CTACAAGCAGGGGCAGAACCAGCTCTACAACGAACTCAATCTTGGTCGGAGAG |
| | | AGGAGTACGACGTGCTGGACAAGCGGAGAGGACGGGACCCAGAAATGGGCGGG |
| | | AAGCCGCGCAGAAAGAATCCCCAAGAGGGCCTGTACAACGAGCTCCAAAAGGA |
| | | TAAGATGGCAGAAGCCTATAGCGAGATTGGTATGAAAGGGGAACGCAGAAGAG |
| | | GCAAAGGCCACGACGGACTGTACCAGGGACTCAGCACCGCCACCAAGGACACC |
| | | TATGACGCTCTTCACATGCAGGCCCTGCCGCCTCGG |

149364

| | | |
|---|---|---|
| 149364-aa | 1069 | EVQLVESGGGLVKPGGSLRLSCAASGFTFSSYSMNWVRQAPGKGLEWVSSISS |
| ScFv domain | | SSSYIYYADSVKGRFTISRDNAKNSLYLQMNSLRAEDTAVYYCAKTIAAVYAF |
| | | DIWGQGTTVTVSSGGGGSGGGGSGGGGSEIVLTQSPLSLPVTPEEPASISCRS |
| | | SQSLLHSNGYNYLDWYLQKPGQSPQLLIYLGSNRASGVPDRFSGSGSGTDFTL |
| | | KISRVEAEDVGVYYCMQALQTPYTFGQGTKLEIK |
| 149364-nt ScFv | 1070 | GAAGTGCAGCTTGTCGAATCCGGGGGGGGACTGGTCAAGCCGGGCGGATCACT |
| domain | | GAGACTGTCCTGCGCCGCGAGCGGCTTCACGTTCTCCTCCTACTCCATGAACT |
| | | GGGTCCGCCAAGCCCCCGGGAAGGGACTGGAATGGGTGTCCTCTATCTCCTCG |
| | | TCGTCGTCCTACATCTACTACGCCGACTCCGTGAAGGGAAGATTCACCATTTC |
| | | CCGCGACAACGCAAAGAACTCACTGTACTTGCAAATGAACTCACTCCGGGCCG |
| | | AAGATACTGCTGTGTACTATTGCGCCAAGACTATTGCCGCCGTCTACGCTTTC |
| | | GACATCTGGGGCCAGGGAACCACCGTGACTGTGTCGTCCGGTGGTGGTGGCTC |
| | | GGGCGGAGGAGGAAGCGGCGGCGGGGGGTCCGAGATTGTGCTGACCCAGTCGC |
| | | CACTGAGCCTCCCTGTGACCCCCGAGGAACCCGCCAGCATCAGCTGCCGGTCC |
| | | AGCCAGTCCCTGCTCCACTCCAACGGATACAATTACCTCGATTGGTACCTTCA |
| | | GAAGCCTGGACAAAGCCCGCAGCTGCTCATCTACTTGGGATCAAACCGCGCGT |
| | | CAGGAGTGCCTGACCGGTTCTCCGGCTCGGGCAGCGGTACCGATTTCACCCTG |
| | | AAAATCTCCAGGGTGGAGGCAGAGGACGTGGGAGTGTATTACTGTATGCAGGC |
| | | GCTGCAGACTCCGTACACATTTGGGCAGGGCACCAAGCTGGAGATCAAG |
| 149364-aa VH | 1071 | EVQLVESGGGLVKPGGSLRLSCAASGFTFSSYSMNWVRQAPGKGLEWVSSISS |
| | | SSSYIYYADSVKGRFTISRDNAKNSLYLQMNSLRAEDTAVYYCAKTIAAVYAF |
| | | DIWGQGTTVTVSS |
| 149364-aa VL | 1072 | EIVLTQSPLSLPVTPEEPASISCRSSQSLLHSNGYNYLDWYLQKPGQSPQLLI |
| | | YLGSNRASGVPDRFSGSGSGTDFTLKISRVEAEDVGVYYCMQALQTPYTFGQG |
| | | TKLEIK |
| 149364-aa Full | 1073 | MALPVTALLLPLALLLHAARPEVQLVESGGGLVKPGGSLRLSCAASGFTFSSY |
| CAR | | SMNWVRQAPGKGLEWVSSISSSSSYIYYADSVKGRFTISRDNAKNSLYLQMNS |
| | | LRAEDTAVYYCAKTIAAVYAFDIWGQGTTVTVSSGGGGSGGGGSGGGGSEIVL |
| | | TQSPLSLPVTPEEPASISCRSSQSLLHSNGYNYLDWYLQKPGQSPQLLIYLGS |
| | | NRASGVPDRFSGSGSGTDFTLKISRVEAEDVGVYYCMQALQTPYTFGQGTKLE |
| | | IKTTTPAPRPPTPAPTIASQPLSLRPEACRPAAGGAVHTRGLDFACDIYIWAP |
| | | LAGTCGVLLLSLVITLYCKRGRKKLLYIFKQPFMRPVQTTQEEDGCSCRFPEE |
| | | EEGGCELRVKFSRSADAPAYKQGQNQLYNELNLGRREEYDVLDKRRGRDPEMG |
| | | GKPRRKNPQEGLYNELQKDKMAEAYSEIGMKGERRRGKGHDGLYQGLSTATKD |
| | | TYDALHMQALPPR |
| 149364-nt | 1074 | ATGGCCCTCCCTGTCACCGCCCTGCTGCTTCCGCTGGCTCTTCTGCTCCACGC |
| Full CAR | | CGCTCGGCCCGAAGTGCAGCTTGTCGAATCCGGGGGGGGACTGGTCAAGCCGG |
| | | GCGGATCACTGAGACTGTCCTGCGCCGCGAGCGGCTTCACGTTCTCCTCCTAC |
| | | TCCATGAACTGGGTCCGCCAAGCCCCCGGGAAGGGACTGGAATGGGTGTCCTC |
| | | TATCTCCTCGTCGTCGTCCTACATCTACTACGCCGACTCCGTGAAGGGAAGAT |
| | | TCACCATTTCCCGCGACAACGCAAAGAACTCACTGTACTTGCAAATGAACTCA |
| | | CTCCGGGCCGAAGATACTGCTGTGTACTATTGCGCCAAGACTATTGCCGCCGT |
| | | CTACGCTTTCGACATCTGGGGCCAGGGAACCACCGTGACTGTGTCGTCCGGTG |
| | | GTGGTGGCTCGGGCGGAGGAGGAAGCGGCGGCGGGGGGTCCGAGATTGTGCTG |
| | | ACCCAGTCGCCACTGAGCCTCCCTGTGACCCCCGAGGAACCCGCCAGCATCAG |
| | | CTGCCGGTCCAGCCAGTCCCTGCTCCACTCCAACGGATACAATTACCTCGATT |
| | | GGTACCTTCAGAAGCCTGGACAAAGCCCGCAGCTGCTCATCTACTTGGGATCA |
| | | AACCGCGCGTCAGGAGTGCCTGACCGGTTCTCCGGCTCGGGCAGCGGTACCGA |
| | | TTTCACCCTGAAAATCTCCAGGGTGGAGGCAGAGGACGTGGGAGTGTATTACT |
| | | GTATGCAGGCGCTGCAGACTCCGTACACATTTGGGCAGGGCACCAAGCTGGAG |
| | | ATCAAGACCACTACCCCAGCACCGAGGCCACCCACCCCGGCTCCTACCATCGC |
| | | CTCCCAGCCTCTGTCCCTGCGTCCGGAGGCATGTAGACCCGCAGCTGGTGGGG |
| | | CCGTGCATACCCGGGGTCTTGACTTCGCCTGCGATATCTACATTTGGGCCCCT |
| | | CTGGCTGGTACTTGCGGGGTCCTGCTGCTTTCACTCGTGATCACTCTTTACTG |
| | | TAAGCGCGGTCGGAAGAAGCTGCTGTACATCTTTAAGCAACCCTTCATGAGGC |
| | | CTGTGCAGACTACTCAAGAGGAGGACGGCTGTTCATGCCGGTTCCCAGAGGAG |
| | | GAGGAAGGCGGCTGCGAACTGCGCGTGAAATTCAGCCGCAGCGCAGATGCTCC |
| | | AGCCTACAAGCAGGGGCAGAACCAGCTCTACAACGAACTCAATCTTGGTCGGA |
| | | GAGAGGAGTACGACGTGCTGGACAAGCGGAGAGGACGGGACCCAGAAATGGGC |
| | | GGGAAGCCGCGCAGAAAGAATCCCCAAGAGGGCCTGTACAACGAGCTCCAAAA |
| | | GGATAAGATGGCAGAAGCCTATAGCGAGATTGGTATGAAAGGGGAACGCAGAA |
| | | GAGGCAAAGGCCACGACGGACTGTACCAGGGACTCAGCACCGCCACCAAGGAC |
| | | ACCTATGACGCTCTTCACATGCAGGCCCTGCCGCCTCGG |

149365

| | | |
|---|---|---|
| 149365-aa | 1075 | EVQLVESGGGLVKPGGSLRLSCAASGFTFSDYYMSWIRQAPGKGLEWVSYISS |
| ScFv domain | | SGSTIYYADSVKGRFTISRDNAKNSLYLQMNSLRAEDTAVYYCARDLRGAFDI |
| | | WGQGTMVTVSSGGGGSGGGGSGGGGSSYVLTQSPSVSAAPGYTATISCGGNNI |
| | | GTKSVHWYQQKPGQAPLLVIRDDSVRPSKIPGRFSGSNSGNMATLTISGVQAG |
| | | DEADFYCQVWDSDSEHVVFGGGTKLTVL |
| 149365-nt ScFv | 1076 | GAAGTCCAGCTCGTGGAGTCCGGCGGAGGCCTTGTGAAGCCTGGAGGTTCGCT |
| domain | | GAGACTGTCCTGCGCCGCCTCCGGCTTCACCTTCTCCGACTACTACATGTCCT |
| | | GGATCAGACAGGCCCCGGGAAAGGGCCTGGAATGGGTGTCCTACATCTCGTCA |
| | | TCGGGCAGCACTATCTACTACGCGGACTCAGTGAAGGGGCGGTTCACCATTTC |
| | | CCGGGATAACGCGAAGAACTCGCTGTATCTGCAAATGAACTCACTGAGGGCCG |
| | | AGGACACCGCCGTGTACTACTGCGCCCGCGATCTCCGCGGGGCATTTGACATC |
| | | TGGGGACAGGGAACCATGGTCACAGTGTCCAGCGGAGGGGGAGGATCGGGTGG |
| | | CGGAGGTTCCGGGGGTGGAGGCTCCTCCTACGTGCTGACTCAGAGCCCAAGCG |
| | | TCAGCGCTGCGCCCGGTTACACGGCAACCATCTCCTGTGGCGGAAACAACATT |
| | | GGGACCAAGTCTGTGCACTGGTATCAGCAGAAGCCGGGCCAAGCTCCCCTGTT |
| | | GGTGATCCGCGATGACTCCGTGCGGCCTAGCAAAATTCCGGGACGGTTCTCCG |
| | | GCTCCAACAGCGGCAATATGGCCACTCTCACCATCTCGGGAGTGCAGGCCGGA |
| | | GATGAAGCCGACTTCTACTGCCAAGTCTGGGACTCAGACTCCGAGCATGTGGT |
| | | GTTCGGGGGCGGAACCAAGCTGACTGTGCTC |
| 149365-aa VH | 1077 | EVQLVESGGGLVKPGGSLRLSCAASGFTFSDYYMSWIRQAPGKGLEWVSYISS |
| | | SGSTIYYADSVKGRFTISRDNAKNSLYLQMNSLRAEDTAVYYCARDLRGAFDI |
| | | WGQGTMVTVSS |
| 149365-aa VL | 1078 | SYVLTQSPSVSAAPGYTATISCGGNNIGTKSVHWYQQKPGQAPLLVIRDDSVR |
| | | PSKIPGRFSGSNSGNMATLTISGVQAGDEADFYCQVWDSDSEHVVFGGGTKLT |
| | | VL |
| 149365-aa Full | 1079 | MALPVTALLLPLALLLHAARPEVQLVESGGGLVKPGGSLRLSCAASGFTFSDY |
| CAR | | YMSWIRQAPGKGLEWVSYISSSGSTIYYADSVKGRFTISRDNAKNSLYLQMNS |
| | | LRAEDTAVYYCARDLRGAFDIWGQGTMVTVSSGGGGSGGGGSGGGGSSYVLTQ |
| | | SPSVSAAPGYTATISCGGNNIGTKSVHWYQQKPGQAPLLVIRDDSVRPSKIPG |
| | | RFSGSNSGNMATLTISGVQAGDEADFYCQVWDSDSEHVVFGGGTKLTVLTTTP |
| | | APRPPTPAPTIASQPLSLRPEACRPAAGGAVHTRGLDFACDIYIWAPLAGTCG |
| | | VLLLSLVITLYCKRGRKKLLYIFKQPFMRPVQTTQEEDGCSCRFPEEEEGGCE |
| | | LRVKFSRSADAPAYKQGQNQLYNELNLGRREEYDVLDKRRGRDPEMGGKPRRK |
| | | NPQEGLYNELQKDKMAEAYSEIGMKGERRRGKGHDGLYQGLSTATKDTYDALH |
| | | MQALPPR |
| 149365-nt | 1080 | ATGGCCCTCCCTGTCACCGCCCTGCTGCTTCCGCTGGCTCTTCTGCTCCACGC |
| Full CAR | | CGCTCGGCCCGAAGTCCAGCTCGTGGAGTCCGGCGGAGGCCTTGTGAAGCCTG |
| | | GAGGTTCGCTGAGACTGTCCTGCGCCGCCTCCGGCTTCACCTTCTCCGACTAC |
| | | TACATGTCCTGGATCAGACAGGCCCCGGGAAAGGGCCTGGAATGGGTGTCCTA |
| | | CATCTCGTCATCGGGCAGCACTATCTACTACGCGGACTCAGTGAAGGGGCGGT |
| | | TCACCATTTCCCGGGATAACGCGAAGAACTCGCTGTATCTGCAAATGAACTCA |
| | | CTGAGGGCCGAGGACACCGCCGTGTACTACTGCGCCCGCGATCTCCGCGGGGC |
| | | ATTTGACATCTGGGGACAGGGAACCATGGTCACAGTGTCCAGCGGAGGGGGAG |
| | | GATCGGGTGGCGGAGGTTCCGGGGGTGGAGGCTCCTCCTACGTGCTGACTCAG |
| | | AGCCCAAGCGTCAGCGCTGCGCCCGGTTACACGGCAACCATCTCCTGTGGCGG |
| | | AAACAACATTGGGACCAAGTCTGTGCACTGGTATCAGCAGAAGCCGGGCCAAG |
| | | CTCCCCTGTTGGTGATCCGCGATGACTCCGTGCGGCCTAGCAAAATTCCGGGA |
| | | CGGTTCTCCGGCTCCAACAGCGGCAATATGGCCACTCTCACCATCTCGGGAGT |
| | | GCAGGCCGGAGATGAAGCCGACTTCTACTGCCAAGTCTGGGACTCAGACTCCG |
| | | AGCATGTGGTGTTCGGGGGCGGAACCAAGCTGACTGTGCTCACCACTACCCCA |
| | | GCACCGAGGCCACCCACCCCGGCTCCTACCATCGCCTCCCAGCCTCTGTCCCT |
| | | GCGTCCGGAGGCATGTAGACCCGCAGCTGGTGGGGCCGTGCATACCCGGGGTC |
| | | TTGACTTCGCCTGCGATATCTACATTTGGGCCCCTCTGGCTGGTACTTGCGGG |
| | | GTCCTGCTGCTTTCACTCGTGATCACTCTTTACTGTAAGCGCGGTCGGAAGAA |
| | | GCTGCTGTACATCTTTAAGCAACCCTTCATGAGGCCTGTGCAGACTACTCAAG |
| | | AGGAGGACGGCTGTTCATGCCGGTTCCCAGAGGAGGAGGAAGGCGGCTGCGAA |
| | | CTGCGCGTGAAATTCAGCCGCAGCGCAGATGCTCCAGCCTACAAGCAGGGGCA |
| | | GAACCAGCTCTACAACGAACTCAATCTTGGTCGGAGAGAGGAGTACGACGTGC |
| | | TGGACAAGCGGAGAGGACGGGACCCAGAAATGGGCGGGAAGCCGCGCAGAAAG |
| | | AATCCCCAAGAGGGCCTGTACAACGAGCTCCAAAAGGATAAGATGGCAGAAGC |
| | | CTATAGCGAGATTGGTATGAAAGGGGAACGCAGAAGAGGCAAAGGCCACGACG |
| | | GACTGTACCAGGGACTCAGCACCGCCACCAAGGACACCTATGACGCTCTTCAC |
| | | ATGCAGGCCCTGCCGCCTCGG |

149366

| | | |
|---|---|---|
| 149366-aa | 1081 | QVQLVQSGAEVKKPGASVKVSCKPSGYTVTSHYIHWVRRAPGQGLEWMGMINP |
| ScFv domain | | SGGVTAYSQTLQGRVTMTSDTSSSTVYMELSSLRSEDTAMYYCAREGSGSGWY |
| | | FDFWGRGTLVTVSSGGGGSGGGGSGGGGSSYVLTQPPSVSVSPGQTASITCSG |
| | | DGLSKKYVSWYQQKAGQSPVVLISRDKERPSGIPDRFSGSNSADTATLTISGT |
| | | QAMDEADYYCQAWDDTTVVFGGGTKLTVL |
| 149366-nt ScFv | 1082 | CAAGTGCAGCTGGTGCAGAGCGGGGCCGAAGTCAAGAAGCCGGGAGCCTCCGT |
| domain | | GAAAGTGTCCTGCAAGCCTTCGGGATACACCGTGACCTCCCACTACATTCATT |
| | | GGGTCCGCCGCGCCCCCGGCCAAGGACTCGAGTGGATGGGCATGATCAACCCT |
| | | AGCGGCGGAGTGACCGCGTACAGCCAGACGCTGCAGGGACGCGTGACTATGAC |
| | | CTCGGATACCTCCTCCTCCACCGTCTATATGGAACTGTCCAGCCTGCGGTCCG |
| | | AGGATACCGCCATGTACTACTGCGCCCGGGAAGGATCAGGCTCCGGGTGGTAT |
| | | TTCGACTTCTGGGGAAGAGGCACCCTCGTGACTGTGTCATCTGGGGGAGGGGG |
| | | TTCCGGTGGTGGCGGATCGGGAGGAGGCGGTTCATCCTACGTGCTGACCCAGC |
| | | CACCCTCCGTGTCCGTGAGCCCCGGCCAGACTGCATCGATTACATGTAGCGGC |
| | | GACGGCCTCTCCAAGAAATACGTGTCGTGGTACCAGCAGAAGGCCGGACAGAG |
| | | CCCGGTGGTGCTGATCTCAAGAGATAAGGAGCGGCCTAGCGGAATCCCGGACA |
| | | GGTTCTCGGGTTCCAACTCCGCGGACACTGCTACTCTGACCATCTCGGGGACC |
| | | CAGGCTATGGACGAAGCCGATTACTACTGCCAAGCCTGGGACGACACTACTGT |
| | | CGTGTTTGGAGGGGGCACCAAGTTGACCGTCCTT |
| 149366-aa VH | 1083 | QVQLVQSGAEVKKPGASVKVSCKPSGYTVTSHYIHWVRRAPGQGLEWMGMINP |
| | | SGGVTAYSQTLQGRVTMTSDTSSSTVYMELSSLRSEDTAMYYCAREGSGSGWY |
| | | FDFWGRGTLVTVSS |
| 149366-aa VL | 1084 | SYVLTQPPSVSVSPGQTASITCSGDGLSKKYVSWYQQKAGQSPVVLISRDKER |
| | | PSGIPDRFSGSNSADTATLTISGTQAMDEADYYCQAWDDTTVVFGGGTKLTVL |
| 149366-aa Full | 1085 | MALPVTALLLPLALLLHAARPQVQLVQSGAEVKKPGASVKVSCKPSGYTVTSH |
| CAR | | YIHWVRRAPGQGLEWMGMINPSGGVTAYSQTLQGRVTMTSDTSSSTVYMELSS |
| | | LRSEDTAMYYCAREGSGSGWYFDFWGRGTLVTVSSGGGGSGGGGSGGGGSSYV |
| | | LTQPPSVSVSPGQTASITCSGDGLSKKYVSWYQQKAGQSPVVLISRDKERPSG |
| | | IPDRFSGSNSADTATLTISGTQAMDEADYYCQAWDDTTVVFGGGTKLTVLTTT |
| | | PAPRPPTPAPTIASQPLSLRPEACRPAAGGAVHTRGLDFACDIYIWAPLAGTC |
| | | GVLLLSLVITLYCKRGRKKLLYIFKQPFMRPVQTTQEEDGCSCRFPEEEEGGC |
| | | ELRVKFSRSADAPAYKQGQNQLYNELNLGRREEYDVLDKRRGRDPEMGGKPRR |
| | | KNPQEGLYNELQKDKMAEAYSEIGMKGERRRGKGHDGLYQGLSTATKDTYDAL |
| | | HMQALPPR |
| 149366-nt | 1086 | ATGGCCCTCCCTGTCACCGCCCTGCTGCTTCCGCTGGCTCTTCTGCTCCACGC |
| Full CAR | | CGCTCGGCCCCAAGTGCAGCTGGTGCAGAGCGGGGCCGAAGTCAAGAAGCCGG |
| | | GAGCCTCCGTGAAAGTGTCCTGCAAGCCTTCGGGATACACCGTGACCTCCCAC |
| | | TACATTCATTGGGTCCGCCGCGCCCCCGGCCAAGGACTCGAGTGGATGGGCAT |
| | | GATCAACCCTAGCGGCGGAGTGACCGCGTACAGCCAGACGCTGCAGGGACGCG |
| | | TGACTATGACCTCGGATACCTCCTCCTCCACCGTCTATATGGAACTGTCCAGC |
| | | CTGCGGTCCGAGGATACCGCCATGTACTACTGCGCCCGGGAAGGATCAGGCTC |
| | | CGGGTGGTATTTCGACTTCTGGGGAAGAGGCACCCTCGTGACTGTGTCATCTG |
| | | GGGGAGGGGGTTCCGGTGGTGGCGGATCGGGAGGAGGCGGTTCATCCTACGTG |
| | | CTGACCCAGCCACCCTCCGTGTCCGTGAGCCCCGGCCAGACTGCATCGATTAC |
| | | ATGTAGCGGCGACGGCCTCTCCAAGAAATACGTGTCGTGGTACCAGCAGAAGG |
| | | CCGGACAGAGCCCGGTGGTGCTGATCTCAAGAGATAAGGAGCGGCCTAGCGGA |
| | | ATCCCGGACAGGTTCTCGGGTTCCAACTCCGCGGACACTGCTACTCTGACCAT |
| | | CTCGGGGACCCAGGCTATGGACGAAGCCGATTACTACTGCCAAGCCTGGGACG |
| | | ACACTACTGTCGTGTTTGGAGGGGGCACCAAGTTGACCGTCCTTACCACTACC |
| | | CCAGCACCGAGGCCACCCACCCCGGCTCCTACCATCGCCTCCCAGCCTCTGTC |
| | | CCTGCGTCCGGAGGCATGTAGACCCGCAGCTGGTGGGGCCGTGCATACCCGGG |
| | | GTCTTGACTTCGCCTGCGATATCTACATTTGGGCCCCTCTGGCTGGTACTTGC |
| | | GGGGTCCTGCTGCTTTCACTCGTGATCACTCTTTACTGTAAGCGCGGTCGGAA |
| | | GAAGCTGCTGTACATCTTTAAGCAACCCTTCATGAGGCCTGTGCAGACTACTC |
| | | AAGAGGAGGACGGCTGTTCATGCCGGTTCCCAGAGGAGGAGGAAGGCGGCTGC |
| | | GAACTGCGCGTGAAATTCAGCCGCAGCGCAGATGCTCCAGCCTACAAGCAGGG |
| | | GCAGAACCAGCTCTACAACGAACTCAATCTTGGTCGGAGAGAGGAGTACGACG |
| | | TGCTGGACAAGCGGAGAGGACGGGACCCAGAAATGGGCGGGAAGCCGCGCAGA |
| | | AAGAATCCCCAAGAGGGCCTGTACAACGAGCTCCAAAAGGATAAGATGGCAGA |
| | | AGCCTATAGCGAGATTGGTATGAAAGGGGAACGCAGAAGAGGCAAAGGCCACG |
| | | ACGGACTGTACCAGGGACTCAGCACCGCCACCAAGGACACCTATGACGCTCTT |
| | | CACATGCAGGCCCTGCCGCCTCGG |

149367

| | | |
|---|---|---|
| 149367-aa | 1087 | QVQLQESGPGLVKPSQTLSLTCTVSGGSISSGGYYWSWIRQHPGKGLEWIGYI |
| ScFv domain | | YYSGSTYYNPSLKSRVTISVDTSKNQFSLKLSSVTAADTAVYYCARAGIAARL |
| | | RGAFDIWGQGTMVTVSSGGGGSGGGGSGGGGSDIVMTQSPSSVSASVGDRVII |
| | | TCRASQGIRNWLAWYQQKPGKAPNLLIYAASNLQSGVPSRFSGSGSGADFTLT |
| | | ISSLQPEDVATYYCQKYNSAPFTFGPGTKVDIK |
| 149367-nt ScFv | 1088 | CAAGTGCAGCTTCAGGAGAGCGGCCCGGGACTCGTGAAGCCGTCCCAGACCCT |
| domain | | GTCCCTGACTTGCACCGTGTCGGGAGGAAGCATCTCGAGCGGAGGCTACTATT |
| | | GGTCGTGGATTCGGCAGCACCCTGGAAAGGGCCTGGAATGGATCGGCTACATC |
| | | TACTACTCCGGCTCGACCTACTACAACCCATCGCTGAAGTCCAGAGTGACAAT |
| | | CTCAGTGGACACGTCCAAGAATCAGTTCAGCCTGAAGCTCTCTTCCGTGACTG |
| | | CGGCCGACACCGCCGTGTACTACTGCGCACGCGCTGGAATTGCCGCCCGGCTG |
| | | AGGGGTGCCTTCGACATTTGGGGACAGGGCACCATGGTCACCGTGTCCTCCGG |
| | | CGGCGGAGGTTCCGGGGGTGGAGGCTCAGGAGGAGGGGGGTCCGACATCGTCA |
| | | TGACTCAGTCGCCCTCAAGCGTCAGCGCGTCCGTCGGGGACAGAGTGATCATC |
| | | ACCTGTCGGGCGTCCCAGGGAATTCGCAACTGGCTGGCCTGGTATCAGCAGAA |
| | | GCCCGGAAAGGCCCCCAACCTGTTGATCTACGCCGCCTCAAACCTCCAATCCG |
| | | GGGTGCCGAGCCGCTTCAGCGGCTCCGGTTCGGGTGCCGATTTCACTCTGACC |
| | | ATCTCCTCCCTGCAACCTGAAGATGTGGCTACCTACTACTGCCAAAAGTACAA |
| | | CTCCGCACCTTTTACTTTCGGACCGGGGACCAAAGTGGACATTAAG |
| 149367-aa VH | 1089 | QVQLQESGPGLVKPSQTLSLTCTVSGGSISSGGYYWSWIRQHPGKGLEWIGYI |
| | | YYSGSTYYNPSLKSRVTISVDTSKNQFSLKLSSVTAADTAVYYCARAGIAARL |
| | | RGAFDIWGQGTMVTVSS |
| 149367-aa VL | 1090 | DIVMTQSPSSVSASVGDRVIITCRASQGIRNWLAWYQQKPGKAPNLLIYAASN |
| | | LQSGVPSRFSGSGSGADFTLTISSLQPEDVATYYCQKYNSAPFTFGPGTKVDI |
| | | K |
| 149367-aa Full | 1091 | MALPVTALLLPLALLLHAARPQVQLQESGPGLVKPSQTLSLTCTVSGGSISSG |
| CAR | | GYYWSWIRQHPGKGLEWIGYIYYSGSTYYNPSLKSRVTISVDTSKNQFSLKLS |
| | | SVTAADTAVYYCARAGIAARLRGAFDIWGQGTMVTVSSGGGGSGGGGSGGGGS |
| | | DIVMTQSPSSVSASVGDRVIITCRASQGIRNWLAWYQQKPGKAPNLLIYAASN |
| | | LQSGVPSRFSGSGSGADFTLTISSLQPEDVATYYCQKYNSAPFTFGPGTKVDI |
| | | KTTTPAPRPPTPAPTIASQPLSLRPEACRPAAGGAVHTRGLDFACDIYIWAPL |
| | | AGTCGVLLLSLVITLYCKRGRKKLLYIFKQPFMRPVQTTQEEDGCSCRFPEEE |
| | | EGGCELRVKFSRSADAPAYKQGQNQLYNELNLGRREEYDVLDKRRGRDPEMGG |
| | | KPRRKNPQEGLYNELQKDKMAEAYSEIGMKGERRRGKGHDGLYQGLSTATKDT |
| | | YDALHMQALPPR |
| 149367-nt | 1092 | ATGGCCCTCCCTGTCACCGCCCTGCTGCTTCCGCTGGCTCTTCTGCTCCACGC |
| Full CAR | | CGCTCGGCCCCAAGTGCAGCTTCAGGAGAGCGGCCCGGGACTCGTGAAGCCGT |
| | | CCCAGACCCTGTCCCTGACTTGCACCGTGTCGGGAGGAAGCATCTCGAGCGGA |
| | | GGCTACTATTGGTCGTGGATTCGGCAGCACCCTGGAAAGGGCCTGGAATGGAT |
| | | CGGCTACATCTACTACTCCGGCTCGACCTACTACAACCCATCGCTGAAGTCCA |
| | | GAGTGACAATCTCAGTGGACACGTCCAAGAATCAGTTCAGCCTGAAGCTCTCT |
| | | TCCGTGACTGCGGCCGACACCGCCGTGTACTACTGCGCACGCGCTGGAATTGC |
| | | CGCCCGGCTGAGGGGTGCCTTCGACATTTGGGGACAGGGCACCATGGTCACCG |
| | | TGTCCTCCGGCGGCGGAGGTTCCGGGGGTGGAGGCTCAGGAGGAGGGGGGTCC |
| | | GACATCGTCATGACTCAGTCGCCCTCAAGCGTCAGCGCGTCCGTCGGGGACAG |
| | | AGTGATCATCACCTGTCGGGCGTCCCAGGGAATTCGCAACTGGCTGGCCTGGT |
| | | ATCAGCAGAAGCCCGGAAAGGCCCCCAACCTGTTGATCTACGCCGCCTCAAAC |
| | | CTCCAATCCGGGGTGCCGAGCCGCTTCAGCGGCTCCGGTTCGGGTGCCGATTT |
| | | CACTCTGACCATCTCCTCCCTGCAACCTGAAGATGTGGCTACCTACTACTGCC |
| | | AAAAGTACAACTCCGCACCTTTTACTTTCGGACCGGGGACCAAAGTGGACATT |
| | | AAGACCACTACCCCAGCACCGAGGCCACCCACCCCGGCTCCTACCATCGCCTC |
| | | CCAGCCTCTGTCCCTGCGTCCGGAGGCATGTAGACCCGCAGCTGGTGGGGCCG |
| | | TGCATACCCGGGGTCTTGACTTCGCCTGCGATATCTACATTTGGGCCCCTCTG |
| | | GCTGGTACTTGCGGGGTCCTGCTGCTTTCACTCGTGATCACTCTTTACTGTAA |
| | | GCGCGGTCGGAAGAAGCTGCTGTACATCTTTAAGCAACCCTTCATGAGGCCTG |
| | | TGCAGACTACTCAAGAGGAGGACGGCTGTTCATGCCGGTTCCCAGAGGAGGAG |
| | | GAAGGCGGCTGCGAACTGCGCGTGAAATTCAGCCGCAGCGCAGATGCTCCAGC |
| | | CTACAAGCAGGGGCAGAACCAGCTCTACAACGAACTCAATCTTGGTCGGAGAG |
| | | AGGAGTACGACGTGCTGGACAAGCGGAGAGGACGGGACCCAGAAATGGGCGGG |
| | | AAGCCGCGCAGAAAGAATCCCCAAGAGGGCCTGTACAACGAGCTCCAAAAGGA |
| | | TAAGATGGCAGAAGCCTATAGCGAGATTGGTATGAAAGGGGAACGCAGAAGAG |
| | | GCAAAGGCCACGACGGACTGTACCAGGGACTCAGCACCGCCACCAAGGACACC |
| | | TATGACGCTCTTCACATGCAGGCCCTGCCGCCTCGG |

149368

| | | |
|---|---|---|
| 149368-aa | 1093 | QVQLVQSGAEVKKPGSSVKVSCKASGGTFSSYAISWVRQAPGQGLEWMGGIIP |
| ScFv domain | | IFGTANYAQKFQGRVTITADESTSTAYMELSSLRSEDTAVYYCARRGGYQLLR |
| | | WDVGLLRSAFDIWGQGTMVTVSSGGGGSGGGGSGGGGSSYVLTQPPSVSVAPG |
| | | QTARITCGGNNIGSKSVHWYQQKPGQAPVLVLYGKNNRPSGVPDRFSGSRSGT |
| | | TASLTITGAQAEDEADYYCSSRDSSGDHLRVFGTGTKVTVL |
| 149368-nt ScFv | 1094 | CAAGTGCAGCTGGTCCAGTCGGGCGCCGAGGTCAAGAAGCCCGGGAGCTCTGT |
| domain | | GAAAGTGTCCTGCAAGGCCTCCGGGGGCACCTTTAGCTCCTACGCCATCTCCT |
| | | GGGTCCGCCAAGCACCGGGTCAAGGCCTGGAGTGGATGGGGGGAATTATCCCT |
| | | ATCTTCGGCACTGCCAACTACGCCCAGAAGTTCCAGGGACGCGTGACCATTAC |
| | | CGCGGACGAATCCACCTCCACCGCTTATATGGAGCTGTCCAGCTTGCGCTCGG |
| | | AAGATACCGCCGTGTACTACTGCGCCCGGAGGGGTGGATACCAGCTGCTGAGA |
| | | TGGGACGTGGGCCTCCTGCGGTCGGCGTTCGACATCTGGGGCCAGGGCACTAT |
| | | GGTCACTGTGTCCAGCGGAGGAGGCGGATCGGGAGGCGGCGGATCAGGGGGAG |
| | | GCGGTTCCAGCTACGTGCTTACTCAACCCCCTTCGGTGTCCGTGGCCCCGGGA |
| | | CAGACCGCCAGAATCACTTGCGGAGGAAACAACATTGGGTCCAAGAGCGTGCA |
| | | TTGGTACCAGCAGAAGCCAGGACAGGCCCCTGTGCTGGTGCTCTACGGGAAGA |
| | | ACAATCGGCCCAGCGGAGTGCCGGACAGGTTCTCGGGTTCACGCTCCGGTACA |
| | | ACCGCTTCACTGACTATCACCGGGGCCCAGGCAGAGGATGAAGCGGACTACTA |
| | | CTGTTCCTCCCGGGATTCATCCGGCGACCACCTCCGGGTGTTCGGAACCGGAA |
| | | CGAAGGTCACCGTGCTG |
| 149368-aa VH | 1095 | QVQLVQSGAEVKKPGSSVKVSCKASGGTFSSYAISWVRQAPGQGLEWMGGIIP |
| | | IFGTANYAQKFQGRVTITADESTSTAYMELSSLRSEDTAVYYCARRGGYQLLR |
| | | WDVGLLRSAFDIWGQGTMVTVSS |
| 149368-aa VL | 1096 | SYVLTQPPSVSVAPGQTARITCGGNNIGSKSVHWYQQKPGQAPVLVLYGKNNR |
| | | PSGVPDRFSGSRSGTTASLTITGAQAEDEADYYCSSRDSSGDHLRVFGTGTKV |
| | | TVL |
| 149368-aa Full | 1097 | MALPVTALLLPLALLLHAARPQVQLVQSGAEVKKPGSSVKVSCKASGGTFSSY |
| CAR | | AISWVRQAPGQGLEWMGGIIPIFGTANYAQKFQGRVTITADESTSTAYMELSS |
| | | LRSEDTAVYYCARRGGYQLLRWDVGLLRSAFDIWGQGTMVTVSSGGGGSGGGG |
| | | SGGGGSSYVLTQPPSVSVAPGQTARITCGGNNIGSKSVHWYQQKPGQAPVLVL |
| | | YGKNNRPSGVPDRFSGSRSGTTASLTITGAQAEDEADYYCSSRDSSGDHLRVF |
| | | GTGTKVTVLTTTPAPRPPTPAPTIASQPLSLRPEACRPAAGGAVHTRGLDFAC |
| | | DIYIWAPLAGTCGVLLLSLVITLYCKRGRKKLLYIFKQPFMRPVQTTQEEDGC |
| | | SCRFPEEEEGGCELRVKFSRSADAPAYKQGQNQLYNELNLGRREEYDVLDKRR |
| | | GRDPEMGGKPRRKNPQEGLYNELQKDKMAEAYSEIGMKGERRRGKGHDGLYQG |
| | | LSTATKDTYDALHMQALPPR |
| 149368-nt | 1098 | ATGGCCCTCCCTGTCACCGCCCTGCTGCTTCCGCTGGCTCTTCTGCTCCACGC |
| Full CAR | | CGCTCGGCCCCAAGTGCAGCTGGTCCAGTCGGGCGCCGAGGTCAAGAAGCCCG |
| | | GGAGCTCTGTGAAAGTGTCCTGCAAGGCCTCCGGGGGCACCTTTAGCTCCTAC |
| | | GCCATCTCCTGGGTCCGCCAAGCACCGGGTCAAGGCCTGGAGTGGATGGGGGG |
| | | AATTATCCCTATCTTCGGCACTGCCAACTACGCCCAGAAGTTCCAGGGACGCG |
| | | TGACCATTACCGCGGACGAATCCACCTCCACCGCTTATATGGAGCTGTCCAGC |
| | | TTGCGCTCGGAAGATACCGCCGTGTACTACTGCGCCCGGAGGGGTGGATACCA |
| | | GCTGCTGAGATGGGACGTGGGCCTCCTGCGGTCGGCGTTCGACATCTGGGGCC |
| | | AGGGCACTATGGTCACTGTGTCCAGCGGAGGAGGCGGATCGGGAGGCGGCGGA |
| | | TCAGGGGGAGGCGGTTCCAGCTACGTGCTTACTCAACCCCCTTCGGTGTCCGT |
| | | GGCCCCGGGACAGACCGCCAGAATCACTTGCGGAGGAAACAACATTGGGTCCA |
| | | AGAGCGTGCATTGGTACCAGCAGAAGCCAGGACAGGCCCCTGTGCTGGTGCTC |
| | | TACGGGAAGAACAATCGGCCCAGCGGAGTGCCGGACAGGTTCTCGGGTTCACG |
| | | CTCCGGTACAACCGCTTCACTGACTATCACCGGGGCCCAGGCAGAGGATGAAG |
| | | CGGACTACTACTGTTCCTCCCGGGATTCATCCGGCGACCACCTCCGGGTGTTC |
| | | GGAACCGGAACGAAGGTCACCGTGCTGACCACTACCCCAGCACCGAGGCCACC |
| | | CACCCCGGCTCCTACCATCGCCTCCCAGCCTCTGTCCCTGCGTCCGGAGGCAT |
| | | GTAGACCCGCAGCTGGTGGGGCCGTGCATACCCGGGGTCTTGACTTCGCCTGC |
| | | GATATCTACATTTGGGCCCCTCTGGCTGGTACTTGCGGGGTCCTGCTGCTTTC |
| | | ACTCGTGATCACTCTTTACTGTAAGCGCGGTCGGAAGAAGCTGCTGTACATCT |
| | | TTAAGCAACCCTTCATGAGGCCTGTGCAGACTACTCAAGAGGAGGACGGCTGT |
| | | TCATGCCGGTTCCCAGAGGAGGAGGAAGGCGGCTGCGAACTGCGCGTGAAATT |
| | | CAGCCGCAGCGCAGATGCTCCAGCCTACAAGCAGGGGCAGAACCAGCTCTACA |
| | | ACGAACTCAATCTTGGTCGGAGAGAGGAGTACGACGTGCTGGACAAGCGGAGA |
| | | GGACGGGACCCAGAAATGGGCGGGAAGCCGCGCAGAAAGAATCCCCAAGAGGG |
| | | CCTGTACAACGAGCTCCAAAAGGATAAGATGGCAGAAGCCTATAGCGAGATTG |
| | | GTATGAAAGGGGAACGCAGAAGAGGCAAAGGCCACGACGGACTGTACCAGGGA |
| | | CTCAGCACCGCCACCAAGGACACCTATGACGCTCTTCACATGCAGGCCCTGCC |
| | | GCCTCGG |

149369

| | | |
|---|---|---|
| 149369-aa | 1099 | EVQLQQSGPGLVKPSQTLSLTCAISGDSVSSNSAAWNWIRQSPSRGLEWLGRT |
| ScFv domain | | YYRSKWYSFYAISLKSRIIINPDTSKNQFSLQLKSVTPEDTAVYYCARSSPEG |
| | | LFLYWFDPWGQGTLVTVSSGGDGSGGGGSGGGGSSSELTQDPAVSVALGQTIR |
| | | ITCQGDSLGNYYATWYQQKPGQAPVLVIYGTNNRPSGIPDRFSASSSGNTASL |
| | | TITGAQAEDEADYYCNSRDSSGHHLLFGTGTKVTVL |
| 149369-nt ScFv | 1100 | GAAGTGCAGCTCCAACAGTCAGGACCGGGGCTCGTGAAGCCATCCCAGACCCT |
| domain | | GTCCCTGACTTGTGCCATCTCGGGAGATAGCGTGTCATCGAACTCCGCCGCCT |
| | | GGAACTGGATTCGGCAGAGCCCGTCCCGCGGACTGGAGTGGCTTGGAAGGACC |
| | | TACTACCGGTCCAAGTGGTACTCTTTCTACGCGATCTCGCTGAAGTCCCGCAT |
| | | TATCATTAACCCTGATACCTCCAAGAATCAGTTCTCCCTCCAACTGAAATCCG |
| | | TCACCCCCGAGGACACAGCAGTGTATTACTGCGCACGGAGCAGCCCCGAAGGA |
| | | CTGTTCCTGTATTGGTTTGACCCCTGGGGCCAGGGGACTCTTGTGACCGTGTC |
| | | GAGCGGCGGAGATGGGTCCGGTGGCGGTGGTTCGGGGGGCGGCGGATCATCAT |
| | | CCGAACTGACCCAGGACCCGGCTGTGTCCGTGGCGCTGGGACAAACCATCCGC |
| | | ATTACGTGCCAGGGAGACTCCCTGGGCAACTACTACGCCACTTGGTACCAGCA |
| | | GAAGCCGGGCCAAGCCCCTGTGTTGGTCATCTACGGGACCAACAACAGACCTT |
| | | CCGGCATCCCCGACCGGTTCAGCGCTTCGTCCTCCGGCAACACTGCCAGCCTG |
| | | ACCATCACTGGAGCGCAGGCCGAAGATGAGGCCGACTACTACTGCAACAGCAG |
| | | AGACTCCTCGGGTCATCACCTCTTGTTCGGAACTGGAACCAAGGTCACCGTGC |
| | | TG |
| 149369-aa VH | 1101 | EVQLQQSGPGLVKPSQTLSLTCAISGDSVSSNSAAWNWIRQSPSRGLEWLGRT |
| | | YYRSKWYSFYAISLKSRIIINPDTSKNQFSLQLKSVTPEDTAVYYCARSSPEG |
| | | LFLYWFDPWGQGTLVTVSS |
| 149369-aa VL | 1102 | SSELTQDPAVSVALGQTIRITCQGDSLGNYYATWYQQKPGQAPVLVIYGTNNR |
| | | PSGIPDRFSASSSGNTASLTITGAQAEDEADYYCNSRDSSGHHLLFGTGTKVT |
| | | VL |
| 149369-aa Full | 1103 | MALPVTALLLPLALLLHAARPEVQLQQSGPGLVKPSQTLSLTCAISGDSVSSN |
| CAR | | SAAWNWIRQSPSRGLEWLGRTYYRSKWYSFYAISLKSRIIINPDTSKNQFSLQ |
| | | LKSVTPEDTAVYYCARSSPEGLFLYWFDPWGQGTLVTVSSGGDGSGGGGSGGG |
| | | GSSSELTQDPAVSVALGQTIRITCQGDSLGNYYATWYQQKPGQAPVLVIYGTN |
| | | NRPSGIPDRFSASSSGNTASLTITGAQAEDEADYYCNSRDSSGHHLLFGTGTK |
| | | VTVLTTTPAPRPPTPAPTIASQPLSLRPEACRPAAGGAVHTRGLDFACDIYIW |
| | | APLAGTCGVLLLSLVITLYCKRGRKKLLYIFKQPFMRPVQTTQEEDGCSCRFP |
| | | EEEEGGCELRVKFSRSADAPAYKQGQNQLYNELNLGRREEYDVLDKRRGRDPE |
| | | MGGKPRRKNPQEGLYNELQKDKMAEAYSEIGMKGERRRGKGHDGLYQGLSTAT |
| | | KDTYDALHMQALPPR |
| 149369-nt | 1104 | ATGGCCCTCCCTGTCACCGCCCTGCTGCTTCCGCTGGCTCTTCTGCTCCACGC |
| Full CAR | | CGCTCGGCCCGAAGTGCAGCTCCAACAGTCAGGACCGGGGCTCGTGAAGCCAT |
| | | CCCAGACCCTGTCCCTGACTTGTGCCATCTCGGGAGATAGCGTGTCATCGAAC |
| | | TCCGCCGCCTGGAACTGGATTCGGCAGAGCCCGTCCCGCGGACTGGAGTGGCT |
| | | TGGAAGGACCTACTACCGGTCCAAGTGGTACTCTTTCTACGCGATCTCGCTGA |
| | | AGTCCCGCATTATCATTAACCCTGATACCTCCAAGAATCAGTTCTCCCTCCAA |
| | | CTGAAATCCGTCACCCCCGAGGACACAGCAGTGTATTACTGCGCACGGAGCAG |
| | | CCCCGAAGGACTGTTCCTGTATTGGTTTGACCCCTGGGGCCAGGGGACTCTTG |
| | | TGACCGTGTCGAGCGGCGGAGATGGGTCCGGTGGCGGTGGTTCGGGGGGCGGC |
| | | GGATCATCATCCGAACTGACCCAGGACCCGGCTGTGTCCGTGGCGCTGGGACA |
| | | AACCATCCGCATTACGTGCCAGGGAGACTCCCTGGGCAACTACTACGCCACTT |
| | | GGTACCAGCAGAAGCCGGGCCAAGCCCCTGTGTTGGTCATCTACGGGACCAAC |
| | | AACAGACCTTCCGGCATCCCCGACCGGTTCAGCGCTTCGTCCTCCGGCAACAC |
| | | TGCCAGCCTGACCATCACTGGAGCGCAGGCCGAAGATGAGGCCGACTACTACT |
| | | GCAACAGCAGAGACTCCTCGGGTCATCACCTCTTGTTCGGAACTGGAACCAAG |
| | | GTCACCGTGCTGACCACTACCCCAGCACCGAGGCCACCCACCCCGGCTCCTAC |
| | | CATCGCCTCCCAGCCTCTGTCCCTGCGTCCGGAGGCATGTAGACCCGCAGCTG |
| | | GTGGGGCCGTGCATACCCGGGGTCTTGACTTCGCCTGCGATATCTACATTTGG |
| | | GCCCCTCTGGCTGGTACTTGCGGGGTCCTGCTGCTTTCACTCGTGATCACTCT |
| | | TTACTGTAAGCGCGGTCGGAAGAAGCTGCTGTACATCTTTAAGCAACCCTTCA |
| | | TGAGGCCTGTGCAGACTACTCAAGAGGAGGACGGCTGTTCATGCCGGTTCCCA |
| | | GAGGAGGAGGAAGGCGGCTGCGAACTGCGCGTGAAATTCAGCCGCAGCGCAGA |
| | | TGCTCCAGCCTACAAGCAGGGGCAGAACCAGCTCTACAACGAACTCAATCTTG |
| | | GTCGGAGAGAGGAGTACGACGTGCTGGACAAGCGGAGAGGACGGGACCCAGAA |
| | | ATGGGCGGGAAGCCGCGCAGAAAGAATCCCCAAGAGGGCCTGTACAACGAGCT |
| | | CCAAAAGGATAAGATGGCAGAAGCCTATAGCGAGATTGGTATGAAAGGGGAAC |
| | | GCAGAAGAGGCAAAGGCCACGACGGACTGTACCAGGGACTCAGCACCGCCACC |
| | | AAGGACACCTATGACGCTCTTCACATGCAGGCCCTGCCGCCTCGG |

BCMA_EBB-C1978-A4

| | | |
|---|---|---|
| BCMA_EBB- | 1105 | EVQLVESGGGLVQPGGSLRLSCAASGFTFSSYAMSWVRQAPGKGLEWVSAISG |
| C1978-A4 - aa | | SGGSTYYADSVKGRFTISRDNSKNTLYLQMNSLRAEDTAVYYCAKVEGSGSLD |
| ScFv domain | | YWGQGTLVTVSSGGGGSGGGGSGGGGSEIVMTQSPGTLSLSPGERATLSCRAS |
| | | QSVSSAYLAWYQQKPGQPPRLLISGASTRATGIPDRFGGSGSGTDFTLTISRL |
| | | EPEDFAVYYCQHYGSSFNGSSLFTFGQGTRLEIK |
| BCMA_EBB- | 1106 | GAAGTGCAGCTCGTGGAGTCAGGAGGCGGCCTGGTCCAGCCGGGAGGGTCCCT |
| C1978-A4 - nt | | TAGACTGTCATGCGCCGCAAGCGGATTCACTTTCTCCTCCTATGCCATGAGCT |
| ScFv domain | | GGGTCCGCCAAGCCCCCGGAAAGGGACTGGAATGGGTGTCCGCCATCTCGGGG |
| | | TCTGGAGGCTCAACTTACTACGCTGACTCCGTGAAGGGACGGTTCACCATTAG |
| | | CCGCGACAACTCCAAGAACACCCTCTACCTCCAAATGAACTCCCTGCGGGCCG |
| | | AGGATACCGCCGTCTACTACTGCGCCAAAGTGGAAGGTTCAGGATCGCTGGAC |
| | | TACTGGGGACAGGGTACTCTCGTGACCGTGTCATCGGGCGGAGGAGGTTCCGG |
| | | CGGTGGCGGCTCCGGCGGCGGAGGGTCGGAGATCGTGATGACCCAGAGCCCTG |
| | | GTACTCTGAGCCTTTCGCCGGGAGAAAGGGCCACCCTGTCCTGCCGCGCTTCC |
| | | CAATCCGTGTCCTCCGCGTACTTGGCGTGGTACCAGCAGAAGCCGGGACAGCC |
| | | CCCTCGGCTGCTGATCAGCGGGGCCAGCACCCGGGCAACCGGAATCCCAGACA |
| | | GATTCGGGGGTTCCGGCAGCGGCACAGATTTCACCCTGACTATTTCGAGGTTG |
| | | GAGCCCGAGGACTTTGCGGTGTATTACTGTCAGCACTACGGGTCGTCCTTTAA |
| | | TGGCTCCAGCCTGTTCACGTTCGGACAGGGGACCCGCCTGGAAATCAAG |
| BCMA_EBB- | 1107 | EVQLVESGGGLVQPGGSLRLSCAASGFTFSSYAMSWVRQAPGKGLEWVSAISG |
| C1978-A4 - aa | | SGGSTYYADSVKGRFTISRDNSKNTLYLQMNSLRAEDTAVYYCAKVEGSGSLD |
| VH | | YWGQGTLVTVSS |
| BCMA_EBB- | 1108 | EIVMTQSPGTLSLSPGERATLSCRASQSVSSAYLAWYQQKPGQPPRLLISGAS |
| C1978-A4 - aa | | TRATGIPDRFGGSGSGTDFTLTISRLEPEDFAVYYCQHYGSSFNGSSLFTFGQ |
| VL | | GTRLEIK |
| BCMA_EBB- | 1109 | MALPVTALLLPLALLLHAARPEVQLVESGGGLVQPGGSLRLSCAASGFTFSSY |
| C1978-A4 - aa | | AMSWVRQAPGKGLEWVSAISGSGGSTYYADSVKGRFTISRDNSKNTLYLQMNS |
| Full CART | | LRAEDTAVYYCAKVEGSGSLDYWGQGTLVTVSSGGGGSGGGGSGGGGSEIVMT |
| | | QSPGTLSLSPGERATLSCRASQSVSSAYLAWYQQKPGQPPRLLISGASTRATG |
| | | IPDRFGGSGSGTDFTLTISRLEPEDFAVYYCQHYGSSFNGSSLFTFGQGTRLE |
| | | IKTTTPAPRPPTPAPTIASQPLSLRPEACRPAAGGAVHTRGLDFACDIYIWAP |
| | | LAGTCGVLLLSLVITLYCKRGRKKLLYIFKQPFMRPVQTTQEEDGCSCRFPEE |
| | | EEGGCELRVKFSRSADAPAYKQGQNQLYNELNLGRREEYDVLDKRRGRDPEMG |
| | | GKPRRKNPQEGLYNELQKDKMAEAYSEIGMKGERRRGKGHDGLYQGLSTATKD |
| | | TYDALHMQALPPR |
| BCMA_EBB- | 1110 | ATGGCCCTCCCTGTCACCGCCCTGCTGCTTCCGCTGGCTCTTCTGCTCCACGC |
| C1978-A4 - nt | | CGCTCGGCCCGAAGTGCAGCTCGTGGAGTCAGGAGGCGGCCTGGTCCAGCCGG |
| Full CART | | GAGGGTCCCTTAGACTGTCATGCGCCGCAAGCGGATTCACTTTCTCCTCCTAT |
| | | GCCATGAGCTGGGTCCGCCAAGCCCCCGGAAAGGGACTGGAATGGGTGTCCGC |
| | | CATCTCGGGGTCTGGAGGCTCAACTTACTACGCTGACTCCGTGAAGGGACGGT |
| | | TCACCATTAGCCGCGACAACTCCAAGAACACCCTCTACCTCCAAATGAACTCC |
| | | CTGCGGGCCGAGGATACCGCCGTCTACTACTGCGCCAAAGTGGAAGGTTCAGG |
| | | ATCGCTGGACTACTGGGGACAGGGTACTCTCGTGACCGTGTCATCGGGCGGAG |
| | | GAGGTTCCGGCGGTGGCGGCTCCGGCGGCGGAGGGTCGGAGATCGTGATGACC |
| | | CAGAGCCCTGGTACTCTGAGCCTTTCGCCGGGAGAAAGGGCCACCCTGTCCTG |
| | | CCGCGCTTCCCAATCCGTGTCCTCCGCGTACTTGGCGTGGTACCAGCAGAAGC |
| | | CGGGACAGCCCCCTCGGCTGCTGATCAGCGGGGCCAGCACCCGGGCAACCGGA |
| | | ATCCCAGACAGATTCGGGGGTTCCGGCAGCGGCACAGATTTCACCCTGACTAT |
| | | TTCGAGGTTGGAGCCCGAGGACTTTGCGGTGTATTACTGTCAGCACTACGGGT |
| | | CGTCCTTTAATGGCTCCAGCCTGTTCACGTTCGGACAGGGGACCCGCCTGGAA |
| | | ATCAAGACCACTACCCCAGCACCGAGGCCACCCACCCCGGCTCCTACCATCGC |
| | | CTCCCAGCCTCTGTCCCTGCGTCCGGAGGCATGTAGACCCGCAGCTGGTGGGG |
| | | CCGTGCATACCCGGGGTCTTGACTTCGCCTGCGATATCTACATTTGGGCCCCT |
| | | CTGGCTGGTACTTGCGGGGTCCTGCTGCTTTCACTCGTGATCACTCTTTACTG |
| | | TAAGCGCGGTCGGAAGAAGCTGCTGTACATCTTTAAGCAACCCTTCATGAGGC |
| | | CTGTGCAGACTACTCAAGAGGAGGACGGCTGTTCATGCCGGTTCCCAGAGGAG |
| | | GAGGAAGGCGGCTGCGAACTGCGCGTGAAATTCAGCCGCAGCGCAGATGCTCC |
| | | AGCCTACAAGCAGGGGCAGAACCAGCTCTACAACGAACTCAATCTTGGTCGGA |
| | | GAGAGGAGTACGACGTGCTGGACAAGCGGAGAGGACGGGACCCAGAAATGGGC |
| | | GGGAAGCCGCGCAGAAAGAATCCCCAAGAGGGCCTGTACAACGAGCTCCAAAA |
| | | GGATAAGATGGCAGAAGCCTATAGCGAGATTGGTATGAAAGGGGAACGCAGAA |
| | | GAGGCAAAGGCCACGACGGACTGTACCAGGGACTCAGCACCGCCACCAAGGAC |
| | | ACCTATGACGCTCTTCACATGCAGGCCCTGCCGCCTCGG |

BCMA_EBB-C1978-G1

| | | |
|---|---|---|
| BCMA_EBB- | 1111 | EVQLVETGGGLVQPGGSLRLSCAASGITFSRYPMSWVRQAPGKGLEWV |
| C1978-G1 - aa | | SGISDSGVSTYYADSAKGRFTISRDNSKNTLFLQMSSLRDEDTAVYYCV |
| ScFv domain | | TRAGSEASDIWGQGTMVTVSSGGGGSGGGGSGGGGSEIVLTQSPATLSL |
| | | SPGERATLSCRASQSVSNSLAWYQQKPGQAPRLLIYDASSRATGIPDRFS |
| | | GSGSGTDFTLTISRLEPEDFAIYYCQQFGTSSGLTFGGGTKLEIK |
| BCMA_EBB- | 1112 | GAAGTGCAACTGGTGGAAACCGGTGGCGGCCTGGTGCAGCCTGGAGGATCATT |
| C1978-G1 - nt | | GAGGCTGTCATGCGCGGCCAGCGGTATTACCTTCTCCCGGTACCCCATGTCCT |
| ScFv domain | | GGGTCAGACAGGCCCCGGGGAAAGGGCTTGAATGGGTGTCCGGGATCTCGGAC |
| | | TCCGGTGTCAGCACTTACTACGCCGACTCCGCCAAGGGACGCTTCACCATTTC |
| | | CCGGGACAACTCGAAGAACACCCTGTTCCTCCAAATGAGCTCCCTCCGGGACG |
| | | AGGATACTGCAGTGTACTACTGCGTGACCCGCGCCGGGTCCGAGGCGTCTGAC |
| | | ATTTGGGGACAGGGCACTATGGTCACCGTGTCGTCCGGCGGAGGGGGCTCGGG |
| | | AGGCGGTGGCAGCGGAGGAGGAGGGTCCGAGATCGTGCTGACCCAATCCCCGG |
| | | CCACCCTCTCGCTGAGCCCTGGAGAAAGGGCAACCTTGTCCTGTCGCGCGAGC |
| | | CAGTCCGTGAGCAACTCCCTGGCCTGGTACCAGCAGAAGCCCGGACAGGCTCC |
| | | GAGACTTCTGATCTACGACGCTTCGAGCCGGGCCACTGGAATCCCCGACCGCT |
| | | TTTCGGGGTCCGGCTCAGGAACCGATTTCACCCTGACAATCTCACGGCTGGAG |
| | | CCAGAGGATTTCGCCATCTATTACTGCCAGCAGTTCGGTACTTCCTCCGGCCT |
| | | GACTTTCGGAGGCGGCACGAAGCTCGAAATCAAG |
| BCMA_EBB- | 1113 | EVQLVETGGGLVQPGGSLRLSCAASGITFSRYPMSWVRQAPGKGLEWVSGISD |
| C1978-G1 - aa | | SGVSTYYADSAKGRFTISRDNSKNTLFLQMSSLRDEDTAVYYCVTRAGSEASD |
| VH | | IWGQGTMVTVSS |
| BCMA_EBB- | 1114 | EIVLTQSPATLSLSPGERATLSCRASQSVSNSLAWYQQKPGQAPRLLIYDASS |
| C1978-G1 - aa | | RATGIPDRFSGSGSGTDFTLTISRLEPEDFAIYYCQQFGTSSGLTFGGGTKLE |
| VL | | IK |
| BCMA_EBB- | 1115 | MALPVTALLLPLALLLHAARPEVQLVETGGGLVQPGGSLRLSCAASGIT |
| C1978-G1 - aa | | FSRYPMSWVRQAPGKGLEWVSGISDSGVSTYYADSAKGRFTISRDNSK |
| Full CART | | NTLFLQMSSLRDEDTAVYYCVTRAGSEASDIVVGQGTMVTVSSGGGGS |
| | | GGGGSGGGGSEIVLTQSPATLSLSPGERATLSCRASQSVSNSLAWYQQK |
| | | PGQAPRLLIYDASSRATGIPDRFSGSGSGTDFTLTISRLEPEDFAIYYCQQ |
| | | FGTSSGLTFGGGTKLEIKTTTPAPRPPTPAPTIASQPLSLRPEACRPAAGG |
| | | AVHTRGLDFACDIYIWAPLAGTCGVLLLSLVITLYCKRGRKKLLYIFKQ |
| | | PFMRPVQTTQEEDGCSCRFPEEEEGGCELRVKFSRSADAPAYKQGQNQ |
| | | LYNELNLGRREEYDVLDKRRGRDPEMGGKPRRKNPQEGLYNELQKDK |
| | | [sequence omitted] |
| BCMA_EBB- | 1116 | ATGGCCCTCCCTGTCACCGCCCTGCTGCTTCCGCTGGCTCTTCTGCTCCACGC |
| C1978-G1 - nt | | CGCTCGGCCCGAAGTGCAACTGGTGGAAACCGGTGGCGGCCTGGTGCAGCCTG |
| Full CART | | GAGGATCATTGAGGCTGTCATGCGCGGCCAGCGGTATTACCTTCTCCCGGTAC |
| | | CCCATGTCCTGGGTCAGACAGGCCCCGGGGAAAGGGCTTGAATGGGTGTCCGG |
| | | GATCTCGGACTCCGGTGTCAGCACTTACTACGCCGACTCCGCCAAGGGACGCT |
| | | TCACCATTTCCCGGGACAACTCGAAGAACACCCTGTTCCTCCAAATGAGCTCC |
| | | CTCCGGGACGAGGATACTGCAGTGTACTACTGCGTGACCCGCGCCGGGTCCGA |
| | | GGCGTCTGACATTTGGGGACAGGGCACTATGGTCACCGTGTCGTCCGGCGGAG |
| | | GGGGCTCGGGAGGCGGTGGCAGCGGAGGAGGAGGGTCCGAGATCGTGCTGACC |
| | | CAATCCCCGGCCACCCTCTCGCTGAGCCCTGGAGAAAGGGCAACCTTGTCCTG |
| | | TCGCGCGAGCCAGTCCGTGAGCAACTCCCTGGCCTGGTACCAGCAGAAGCCCG |
| | | GACAGGCTCCGAGACTTCTGATCTACGACGCTTCGAGCCGGGCCACTGGAATC |
| | | CCCGACCGCTTTTCGGGGTCCGGCTCAGGAACCGATTTCACCCTGACAATCTC |
| | | ACGGCTGGAGCCAGAGGATTTCGCCATCTATTACTGCCAGCAGTTCGGTACTT |
| | | CCTCCGGCCTGACTTTCGGAGGCGGCACGAAGCTCGAAATCAAGACCACTACC |
| | | CCAGCACCGAGGCCACCCACCCCGGCTCCTACCATCGCCTCCCAGCCTCTGTC |
| | | CCTGCGTCCGGAGGCATGTAGACCCGCAGCTGGTGGGGCCGTGCATACCCGGG |
| | | GTCTTGACTTCGCCTGCGATATCTACATTTGGGCCCCTCTGGCTGGTACTTGC |
| | | GGGGTCCTGCTGCTTTCACTCGTGATCACTCTTTACTGTAAGCGCGGTCGGAA |
| | | GAAGCTGCTGTACATCTTTAAGCAACCCTTCATGAGGCCTGTGCAGACTACTC |
| | | AAGAGGAGGACGGCTGTTCATGCCGGTTCCCAGAGGAGGAGGAAGGCGGCTGC |
| | | GAACTGCGCGTGAAATTCAGCCGCAGCGCAGATGCTCCAGCCTACAAGCAGGG |
| | | GCAGAACCAGCTCTACAACGAACTCAATCTTGGTCGGAGAGAGGAGTACGACG |
| | | TGCTGGACAAGCGGAGAGGACGGGACCCAGAAATGGGCGGGAAGCCGCGCAGA |
| | | AAGAATCCCCAAGAGGGCCTGTACAACGAGCTCCAAAAGGATAAGATGGCAGA |
| | | AGCCTATAGCGAGATTGGTATGAAAGGGGAACGCAGAAGAGGCAAAGGCCACG |
| | | ACGGACTGTACCAGGGACTCAGCACCGCCACCAAGGACACCTATGACGCTCTT |
| | | CACATGCAGGCCCTGCCGCCTCGG |

BCMA_EBB-C1979-C1

| | | |
|---|---|---|
| BCMA_EBB- | 1117 | QVQLVESGGGLVQPGGSLRLSCAASGFTFSSYAMSWVRQAPGKGLEWVSAISG |
| C1979-C1 - aa | | SGGSTYYADSVKGRFTISRDNAKNSLYLQMNSLRAEDTAIYYCARATYKRELR |
| ScFv domain | | YYYGMDVWGQGTMVTVSSGGGGSGGGGSGGGGSEIVMTQSPGTVSLSPGERAT |
| | | LSCRASQSVSSSFLAWYQQKPGQAPRLLIYGASSRATGIPDRFSGSGSGTDFT |
| | | LTISRLEPEDSAVYYCQQYHSSPSWTFGQGTRLEIK |
| BCMA_EBB- | 1118 | CAAGTGCAGCTCGTGGAATCGGGTGGCGGACTGGTGCAGCCGGGGGGCTCACT |
| C1979-C1 - nt | | TAGACTGTCCTGCGCGGCCAGCGGATTCACTTTCTCCTCCTACGCCATGTCCT |
| ScFv domain | | GGGTCAGACAGGCCCCTGGAAAGGGCCTGGAATGGGTGTCCGCAATCAGCGGC |
| | | AGCGGCGGCTCGACCTATTACGCGGATTCAGTGAAGGGCAGATTCACCATTTC |
| | | CCGGGACAACGCCAAGAACTCCTTGTACCTTCAAATGAACTCCCTCCGCGCGG |
| | | AAGATACCGCAATCTACTACTGCGCTCGGGCCACTTACAAGAGGGAACTGCGC |
| | | TACTACTACGGGATGGACGTCTGGGGCCAGGGAACCATGGTCACCGTGTCCAG |
| | | CGGAGGAGGAGGATCGGGAGGAGGCGGTAGCGGGGGTGGAGGGTCGGAGATCG |
| | | TGATGACCCAGTCCCCCGGCACTGTGTCGCTGTCCCCCGGCGAACGGGCCACC |
| | | CTGTCATGTCGGGCCAGCCAGTCAGTGTCGTCAAGCTTCCTCGCCTGGTACCA |
| | | GCAGAAACCGGGACAAGCTCCCCGCCTGCTGATCTACGGAGCCAGCAGCCGGG |
| | | CCACCGGTATTCCTGACCGGTTCTCCGGTTCGGGGTCCGGGACCGACTTTACT |
| | | CTGACTATCTCTCGCCTCGAGCCAGAGGACTCCGCCGTGTATTACTGCCAGCA |
| | | GTACCACTCCTCCCCGTCCTGGACGTTCGGACAGGGCACAAGGCTGGAGATTA |
| | | AG |
| BCMA_EBB- | 1119 | QVQLVESGGGLVQPGGSLRLSCAASGFTFSSYAMSWVRQAPGKGLEWVSAISG |
| C1979-C1 - aa | | SGGSTYYADSVKGRFTISRDNAKNSLYLQMNSLRAEDTAIYYCARATYKRELR |
| VH | | YYYGMDVWGQGTMVTVSS |
| BCMA_EBB- | 1120 | EIVMTQSPGTVSLSPGERATLSCRASQSVSSSFLAWYQQKPGQAPRLLIYGAS |
| C1979-C1 - aa | | SRATGIPDRFSGSGSGTDFTLTISRLEPEDSAVYYCQQYHSSPSWTFGQGTRL |
| VL | | EIK |
| BCMA_EBB- | 1121 | MALPVTALLLPLALLLHAARPQVQLVESGGGLVQPGGSLRLSCAASGFTFSSY |
| C1979-C1 - aa | | AMSWVRQAPGKGLEWVSAISGSGGSTYYADSVKGRFTISRDNAKNSLYLQMNS |
| Full CART | | LRAEDTAIYYCARATYKRELRYYYGMDVWGQGTMVTVSSGGGGSGGGGSGGGG |
| | | SEIVMTQSPGTVSLSPGERATLSCRASQSVSSSFLAWYQQKPGQAPRLLIYGA |
| | | SSRATGIPDRFSGSGSGTDFTLTISRLEPEDSAVYYCQQYHSSPSWTFGQGTR |
| | | LEIKTTTPAPRPPTPAPTIASQPLSLRPEACRPAAGGAVHTRGLDFACDIYIW |
| | | APLAGTCGVLLLSLVITLYCKRGRKKLLYIFKQPFMRPVQTTQEEDGCSCRFP |
| | | EEEEGGCELRVKFSRSADAPAYKQGQNQLYNELNLGRREEYDVLDKRRGRDPE |
| | | MGGKPRRKNPQEGLYNELQKDKMAEAYSEIGMKGERRRGKGHDGLYQGLSTAT |
| | | KDTYDALHMQALPPR |
| BCMA_EBB- | 1122 | ATGGCCCTCCCTGTCACCGCCCTGCTGCTTCCGCTGGCTCTTCTGCTCCACGC |
| C1979-C1 - nt | | CGCTCGGCCCCAAGTGCAGCTCGTGGAATCGGGTGGCGGACTGGTGCAGCCGG |
| Full CART | | GGGGCTCACTTAGACTGTCCTGCGCGGCCAGCGGATTCACTTTCTCCTCCTAC |
| | | GCCATGTCCTGGGTCAGACAGGCCCCTGGAAAGGGCCTGGAATGGGTGTCCGC |
| | | AATCAGCGGCAGCGGCGGCTCGACCTATTACGCGGATTCAGTGAAGGGCAGAT |
| | | TCACCATTTCCCGGGACAACGCCAAGAACTCCTTGTACCTTCAAATGAACTCC |
| | | CTCCGCGCGGAAGATACCGCAATCTACTACTGCGCTCGGGCCACTTACAAGAG |
| | | GGAACTGCGCTACTACTACGGGATGGACGTCTGGGGCCAGGGAACCATGGTCA |
| | | CCGTGTCCAGCGGAGGAGGAGGATCGGGAGGAGGCGGTAGCGGGGGTGGAGGG |
| | | TCGGAGATCGTGATGACCCAGTCCCCCGGCACTGTGTCGCTGTCCCCCGGCGA |
| | | ACGGGCCACCCTGTCATGTCGGGCCAGCCAGTCAGTGTCGTCAAGCTTCCTCG |
| | | CCTGGTACCAGCAGAAACCGGGACAAGCTCCCCGCCTGCTGATCTACGGAGCC |
| | | AGCAGCCGGGCCACCGGTATTCCTGACCGGTTCTCCGGTTCGGGGTCCGGGAC |
| | | CGACTTTACTCTGACTATCTCTCGCCTCGAGCCAGAGGACTCCGCCGTGTATT |
| | | ACTGCCAGCAGTACCACTCCTCCCCGTCCTGGACGTTCGGACAGGGCACAAGG |
| | | CTGGAGATTAAGACCACTACCCCAGCACCGAGGCCACCCACCCCGGCTCCTAC |
| | | CATCGCCTCCCAGCCTCTGTCCCTGCGTCCGGAGGCATGTAGACCCGCAGCTG |
| | | GTGGGGCCGTGCATACCCGGGGTCTTGACTTCGCCTGCGATATCTACATTTGG |
| | | GCCCCTCTGGCTGGTACTTGCGGGGTCCTGCTGCTTTCACTCGTGATCACTCT |
| | | TTACTGTAAGCGCGGTCGGAAGAAGCTGCTGTACATCTTTAAGCAACCCTTCA |
| | | TGAGGCCTGTGCAGACTACTCAAGAGGAGGACGGCTGTTCATGCCGGTTCCCA |
| | | GAGGAGGAGGAAGGCGGCTGCGAACTGCGCGTGAAATTCAGCCGCAGCGCAGA |
| | | TGCTCCAGCCTACAAGCAGGGGCAGAACCAGCTCTACAACGAACTCAATCTTG |
| | | GTCGGAGAGAGGAGTACGACGTGCTGGACAAGCGGAGAGGACGGGACCCAGAA |
| | | ATGGGCGGGAAGCCGCGCAGAAAGAATCCCCAAGAGGGCCTGTACAACGAGCT |
| | | CCAAAAGGATAAGATGGCAGAAGCCTATAGCGAGATTGGTATGAAAGGGGAAC |
| | | GCAGAAGAGGCAAAGGCCACGACGGACTGTACCAGGGACTCAGCACCGCCACC |
| | | AAGGACACCTATGACGCTCTTCACATGCAGGCCCTGCCGCCTCGG |

BCMA_EBB-C1978-C7

| | | |
|---|---|---|
| BCMA_EBB- | 1123 | EVQLVETGGGLVQPGGSLRLSCAASGFTFSSYAMSWVRQAPGKGLEWVSAISG |
| C1978-C7 - aa | | SGGSTYYADSVKGRFTISRDNSKNTLYLQMNTLKAEDTAVYYCARATYKRELR |
| ScFv domain | | YYYGMDVWGQGTTVTVSSGGGGSGGGGSGGGGSEIVLTQSPSTLSLSPGESAT |
| | | LSCRASQSVSTTFLAWYQQKPGQAPRLLIYGSSNRATGIPDRFSGSGSGTDFT |
| | | LTIRRLEPEDFAVYYCQQYHSSPSWTFGQGTKVEIK |
| BCMA_EBB- | 1124 | GAGGTGCAGCTTGTGGAAACCGGTGGCGGACTGGTGCAGCCCGGAGGAAGCCT |
| C1978-C7 - nt | | CAGGCTGTCCTGCGCCGCGTCCGGCTTCACCTTCTCCTCGTACGCCATGTCCT |
| ScFv domain | | GGGTCCGCCAGGCCCCCGGAAAGGGCCTGGAATGGGTGTCCGCCATCTCTGGA |
| | | AGCGGAGGTTCCACGTACTACGCGGACAGCGTCAAGGGAAGGTTCACAATCTC |
| | | CCGCGATAATTCGAAGAACACTCTGTACCTTCAAATGAACACCCTGAAGGCCG |
| | | AGGACACTGCTGTGTACTACTGCGCACGGGCCACCTACAAGAGAGAGCTCCGG |
| | | TACTACTACGGAATGGACGTCTGGGGCCAGGGAACTACTGTGACCGTGTCCTC |
| | | GGGAGGGGGTGGCTCCGGGGGGGGCGGCTCCGGCGGAGGCGGTTCCGAGATTG |
| | | TGCTGACCCAGTCACCTTCAACTCTGTCGCTGTCCCCGGGAGAGAGCGCTACT |
| | | CTGAGCTGCCGGGCCAGCCAGTCCGTGTCCACCACCTTCCTCGCCTGGTATCA |
| | | GCAGAAGCCGGGGCAGGCACCACGGCTCTTGATCTACGGGTCAAGCAACAGAG |
| | | CGACCGGAATTCCTGACCGCTTCTCGGGGAGCGGTTCAGGCACCGACTTCACC |
| | | CTGACTATCCGGCGCCTGGAACCCGAAGATTTCGCCGTGTATTACTGTCAACA |
| | | GTACCACTCCTCGCCGTCCTGGACCTTTGGCCAAGGAACCAAAGTGGAAATCA |
| | | AG |
| BCMA_EBB- | 1125 | EVQLVETGGGLVQPGGSLRLSCAASGFTFSSYAMSWVRQAPGKGLEWVSAISG |
| C1978-C7 - aa | | SGGSTYYADSVKGRFTISRDNSKNTLYLQMNTLKAEDTAVYYCARATYKRELR |
| VH | | YYYGMDVWGQGTTVTVSS |
| BCMA_EBB- | 1126 | EIVLTQSPSTLSLSPGESATLSCRASQSVSTTFLAWYQQKPGQAPRLLIYGSS |
| C1978-C7 - aa | | NRATGIPDRFSGSGSGTDFTLTIRRLEPEDFAVYYCQQYHSSPSWTFGQGTKV |
| VL | | EIK |
| BCMA_EBB- | 1127 | MALPVTALLLPLALLLHAARPEVQLVETGGGLVQPGGSLRLSCAASGFTFSSY |
| C1978-C7 - aa | | AMSWVRQAPGKGLEWVSAISGSGGSTYYADSVKGRFTISRDNSKNTLYLQMNT |
| Full CART | | LKAEDTAVYYCARATYKRELRYYYGMDVWGQGTTVTVSSGGGGSGGGGSGGGG |
| | | SEIVLTQSPSTLSLSPGESATLSCRASQSVSTTFLAWYQQKPGQAPRLLIYGS |
| | | SNRATGIPDRFSGSGSGTDFTLTIRRLEPEDFAVYYCQQYHSSPSWTFGQGTK |
| | | VEIKTTTPAPRPPTPAPTIASQPLSLRPEACRPAAGGAVHTRGLDFACDIYIW |
| | | APLAGTCGVLLLSLVITLYCKRGRKKLLYIFKQPFMRPVQTTQEEDGCSCRFP |
| | | EEEEGGCELRVKFSRSADAPAYKQGQNQLYNELNLGRREEYDVLDKRRGRDPE |
| | | MGGKPRRKNPQEGLYNELQKDKMAEAYSEIGMKGERRRGKGHDGLYQGLSTAT |
| | | KDTYDALHMQALPPR |
| BCMA_EBB- | 1128 | ATGGCCCTCCCTGTCACCGCCCTGCTGCTTCCGCTGGCTCTTCTGCTCCACGC |
| C1978-C7 - nt | | CGCTCGGCCCGAGGTGCAGCTTGTGGAAACCGGTGGCGGACTGGTGCAGCCCG |
| Full CART | | GAGGAAGCCTCAGGCTGTCCTGCGCCGCGTCCGGCTTCACCTTCTCCTCGTAC |
| | | GCCATGTCCTGGGTCCGCCAGGCCCCCGGAAAGGGCCTGGAATGGGTGTCCGC |
| | | CATCTCTGGAAGCGGAGGTTCCACGTACTACGCGGACAGCGTCAAGGGAAGGT |
| | | TCACAATCTCCCGCGATAATTCGAAGAACACTCTGTACCTTCAAATGAACACC |
| | | CTGAAGGCCGAGGACACTGCTGTGTACTACTGCGCACGGGCCACCTACAAGAG |
| | | AGAGCTCCGGTACTACTACGGAATGGACGTCTGGGGCCAGGGAACTACTGTGA |
| | | CCGTGTCCTCGGGAGGGGGTGGCTCCGGGGGGGGCGGCTCCGGCGGAGGCGGT |
| | | TCCGAGATTGTGCTGACCCAGTCACCTTCAACTCTGTCGCTGTCCCCGGGAGA |
| | | GAGCGCTACTCTGAGCTGCCGGGCCAGCCAGTCCGTGTCCACCACCTTCCTCG |
| | | CCTGGTATCAGCAGAAGCCGGGGCAGGCACCACGGCTCTTGATCTACGGGTCA |
| | | AGCAACAGAGCGACCGGAATTCCTGACCGCTTCTCGGGGAGCGGTTCAGGCAC |
| | | CGACTTCACCCTGACTATCCGGCGCCTGGAACCCGAAGATTTCGCCGTGTATT |
| | | ACTGTCAACAGTACCACTCCTCGCCGTCCTGGACCTTTGGCCAAGGAACCAAA |
| | | GTGGAAATCAAGACCACTACCCCAGCACCGAGGCCACCCACCCCGGCTCCTAC |
| | | CATCGCCTCCCAGCCTCTGTCCCTGCGTCCGGAGGCATGTAGACCCGCAGCTG |
| | | GTGGGGCCGTGCATACCCGGGGTCTTGACTTCGCCTGCGATATCTACATTTGG |
| | | GCCCCTCTGGCTGGTACTTGCGGGGTCCTGCTGCTTTCACTCGTGATCACTCT |
| | | TTACTGTAAGCGCGGTCGGAAGAAGCTGCTGTACATCTTTAAGCAACCCTTCA |
| | | TGAGGCCTGTGCAGACTACTCAAGAGGAGGACGGCTGTTCATGCCGGTTCCCA |
| | | GAGGAGGAGGAAGGCGGCTGCGAACTGCGCGTGAAATTCAGCCGCAGCGCAGA |
| | | TGCTCCAGCCTACAAGCAGGGGCAGAACCAGCTCTACAACGAACTCAATCTTG |
| | | GTCGGAGAGAGGAGTACGACGTGCTGGACAAGCGGAGAGGACGGGACCCAGAA |
| | | ATGGGCGGGAAGCCGCGCAGAAAGAATCCCCAAGAGGGCCTGTACAACGAGCT |
| | | CCAAAAGGATAAGATGGCAGAAGCCTATAGCGAGATTGGTATGAAAGGGGAAC |
| | | GCAGAAGAGGCAAAGGCCACGACGGACTGTACCAGGGACTCAGCACCGCCACC |
| | | AAGGACACCTATGACGCTCTTCACATGCAGGCCCTGCCGCCTCGG |

BCMA_EBB-C1978-D10

| | | |
|---|---|---|
| BCMA_EBB- | 1129 | EVQLVETGGGLVQPGRSLRLSCAASGFTFDDYAMHWVRQAPGKGLEWVSGISW |
| C1978-D10 - aa | | NSGSIGYADSVKGRFTISRDNAKNSLYLQMNSLRDEDTAVYYCARVGKAVPDV |
| ScFv domain | | WGQGTTVTVSSGGGGSGGGGSGGGGSDIVMTQTPSSLSASVGDRVTITCRASQ |
| | | SISSYLNWYQQKPGKAPKLLIYAASSLQSGVPSRFSGSGSGTDFTLTISSLQP |
| | | EDFATYYCQQSYSTPYSFGQGTRLEIK |
| BCMA_EBB- | 1130 | GAAGTGCAGCTCGTGGAAACTGGAGGTGGACTCGTGCAGCCTGGACGGTCGCT |
| C1978-D10- nt | | GCGGCTGAGCTGCGCTGCATCCGGCTTCACCTTCGACGATTATGCCATGCACT |
| ScFv domain | | GGGTCAGACAGGCGCCAGGGAAGGGACTTGAGTGGGTGTCCGGTATCAGCTGG |
| | | AATAGCGGCTCAATCGGATACGCGGACTCCGTGAAGGGAAGGTTCACCATTTC |
| | | CCGCGACAACGCCAAGAACTCCCTGTACTTGCAAATGAACAGCCTCCGGGATG |
| | | AGGACACTGCCGTGTACTACTGCGCCCGCGTCGGAAAAGCTGTGCCCGACGTC |
| | | TGGGGCCAGGGAACCACTGTGACCGTGTCCAGCGGCGGGGGTGGATCGGGCGG |
| | | TGGAGGGTCCGGTGGAGGGGGCTCAGATATTGTGATGACCCAGACCCCCTCGT |
| | | CCCTGTCCGCCTCGGTCGGCGACCGCGTGACTATCACATGTAGAGCCTCGCAG |
| | | AGCATCTCCAGCTACCTGAACTGGTATCAGCAGAAGCCGGGGAAGGCCCCGAA |
| | | GCTCCTGATCTACGCGGCATCATCACTGCAATCGGGAGTGCCGAGCCGGTTTT |
| | | CCGGGTCCGGCTCCGGCACCGACTTCACGCTGACCATTTCTTCCCTGCAACCC |
| | | GAGGACTTCGCCACTTACTACTGCCAGCAGTCCTACTCCACCCCTTACTCCTT |
| | | CGGCCAAGGAACCAGGCTGGAAATCAAG |
| BCMA_EBB- | 1131 | EVQLVETGGGLVQPGRSLRLSCAASGFTFDDYAMHWVRQAPGKGLEWVSGISW |
| C1978-D10 - aa | | NSGSIGYADSVKGRFTISRDNAKNSLYLQMNSLRDEDTAVYYCARVGKAVPDV |
| VH | | WGQGTTVTVSS |
| BCMA_EBB- | 1132 | DIVMTQTPSSLSASVGDRVTITCRASQSISSYLNWYQQKPGKAPKLLIYAASS |
| C1978-D10- aa | | LQSGVPSRFSGSGSGTDFTLTISSLQPEDFATYYCQQSYSTPYSFGQGTRLEI |
| VL | | K |
| BCMA_EBB- | 1133 | MALPVTALLLPLALLLHAARPEVQLVETGGGLVQPGRSLRLSCAASGFTFDDY |
| C1978-D10 - aa | | AMHWVRQAPGKGLEWVSGISWNSGSIGYADSVKGRFTISRDNAKNSLYLQMNS |
| Full CART | | LRDEDTAVYYCARVGKAVPDVWGQGTTVTVSSGGGGSGGGGSGGGGSDIVMTQ |
| | | TPSSLSASVGDRVTITCRASQSISSYLNWYQQKPGKAPKLLIYAASSLQSGVP |
| | | SRFSGSGSGTDFTLTISSLQPEDFATYYCQQSYSTPYSFGQGTRLEIKTTTPA |
| | | PRPPTPAPTIASQPLSLRPEACRPAAGGAVHTRGLDFACDIYIWAPLAGTCGV |
| | | LLLSLVITLYCKRGRKKLLYIFKQPFMRPVQTTQEEDGCSCRFPEEEEGGCEL |
| | | RVKFSRSADAPAYKQGQNQLYNELNLGRREEYDVLDKRRGRDPEMGGKPRRKN |
| | | PQEGLYNELQKDKMAEAYSEIGMKGERRRGKGHDGLYQGLSTATKDTYDALHM |
| | | QALPPR |
| BCMA_EBB- | 1134 | ATGGCCCTCCCTGTCACCGCCCTGCTGCTTCCGCTGGCTCTTCTGCTCCACGC |
| C1978-D10 - nt | | CGCTCGGCCCGAAGTGCAGCTCGTGGAAACTGGAGGTGGACTCGTGCAGCCTG |
| Full CART | | GACGGTCGCTGCGGCTGAGCTGCGCTGCATCCGGCTTCACCTTCGACGATTAT |
| | | GCCATGCACTGGGTCAGACAGGCGCCAGGGAAGGGACTTGAGTGGGTGTCCGG |
| | | TATCAGCTGGAATAGCGGCTCAATCGGATACGCGGACTCCGTGAAGGGAAGGT |
| | | TCACCATTTCCCGCGACAACGCCAAGAACTCCCTGTACTTGCAAATGAACAGC |
| | | CTCCGGGATGAGGACACTGCCGTGTACTACTGCGCCCGCGTCGGAAAAGCTGT |
| | | GCCCGACGTCTGGGGCCAGGGAACCACTGTGACCGTGTCCAGCGGCGGGGGTG |
| | | GATCGGGCGGTGGAGGGTCCGGTGGAGGGGGCTCAGATATTGTGATGACCCAG |
| | | ACCCCCTCGTCCCTGTCCGCCTCGGTCGGCGACCGCGTGACTATCACATGTAG |
| | | AGCCTCGCAGAGCATCTCCAGCTACCTGAACTGGTATCAGCAGAAGCCGGGGA |
| | | AGGCCCCGAAGCTCCTGATCTACGCGGCATCATCACTGCAATCGGGAGTGCCG |
| | | AGCCGGTTTTCCGGGTCCGGCTCCGGCACCGACTTCACGCTGACCATTTCTTC |
| | | CCTGCAACCCGAGGACTTCGCCACTTACTACTGCCAGCAGTCCTACTCCACCC |
| | | CTTACTCCTTCGGCCAAGGAACCAGGCTGGAAATCAAGACCACTACCCCAGCA |
| | | CCGAGGCCACCCACCCCGGCTCCTACCATCGCCTCCCAGCCTCTGTCCCTGCG |
| | | TCCGGAGGCATGTAGACCCGCAGCTGGTGGGGCCGTGCATACCCGGGGTCTTG |
| | | ACTTCGCCTGCGATATCTACATTTGGGCCCCTCTGGCTGGTACTTGCGGGGTC |
| | | CTGCTGCTTTCACTCGTGATCACTCTTTACTGTAAGCGCGGTCGGAAGAAGCT |
| | | GCTGTACATCTTTAAGCAACCCTTCATGAGGCCTGTGCAGACTACTCAAGAGG |
| | | AGGACGGCTGTTCATGCCGGTTCCCAGAGGAGGAGGAAGGCGGCTGCGAACTG |
| | | CGCGTGAAATTCAGCCGCAGCGCAGATGCTCCAGCCTACAAGCAGGGGCAGAA |
| | | CCAGCTCTACAACGAACTCAATCTTGGTCGGAGAGAGGAGTACGACGTGCTGG |
| | | ACAAGCGGAGAGGACGGGACCCAGAAATGGGCGGGAAGCCGCGCAGAAAGAAT |
| | | CCCCAAGAGGGCCTGTACAACGAGCTCCAAAAGGATAAGATGGCAGAAGCCTA |
| | | TAGCGAGATTGGTATGAAAGGGGAACGCAGAAGAGGCAAAGGCCACGACGGAC |
| | | TGTACCAGGGACTCAGCACCGCCACCAAGGACACCTATGACGCTCTTCACATG |
| | | CAGGCCCTGCCGCCTCGG |

BCMA_EBB-C1979-C12

| | | |
|---|---|---|
| BCMA_EBB- | 1135 | EVQLVESGGGLVQPGRSLRLSCTASGFTFDDYAMHWVRQRPGKGLEWVASINW |
| C1979-C12- aa | | KGNSLAYGDSVKGRFAISRDNAKNTVFLQMNSLRTEDTAVYYCASHQGVAYYN |
| ScFv domain | | YAMDVWGRGTLVTVSSGGGGSGGGGSGGGGSEIVLTQSPGTLSLSPGERATLS |
| | | CRATQSIGSSFLAWYQQRPGQAPRLLIYGASQRATGIPDRFSGRGSGTDFTLT |
| | | ISRVEPEDSAVYYCQHYESSPSWTFGQGTKVEIK |
| BCMA_EBB- | 1136 | GAAGTGCAGCTCGTGGAGAGCGGGGGAGGATTGGTGCAGCCCGGAAGGTCCCT |
| C1979-C12 - nt | | GCGGCTCTCCTGCACTGCGTCTGGCTTCACCTTCGACGACTACGCGATGCACT |
| ScFv domain | | GGGTCAGACAGCGCCCGGGAAAGGGCCTGGAATGGGTCGCCTCAATCAACTGG |
| | | AAGGGAAACTCCCTGGCCTATGGCGACAGCGTGAAGGGCCGCTTCGCCATTTC |
| | | GCGCGACAACGCCAAGAACACCGTGTTTCTGCAAATGAATTCCCTGCGGACCG |
| | | AGGATACCGCTGTGTACTACTGCGCCAGCCACCAGGGCGTGGCATACTATAAC |
| | | TACGCCATGGACGTGTGGGGAAGAGGGACGCTCGTCACCGTGTCCTCCGGGGG |
| | | CGGTGGATCGGGTGGAGGAGGAAGCGGTGGCGGGGGCAGCGAAATCGTGCTGA |
| | | CTCAGAGCCCGGGAACTCTTTCACTGTCCCCGGGAGAACGGGCCACTCTCTCG |
| | | TGCCGGGCCACCCAGTCCATCGGCTCCTCCTTCCTTGCCTGGTACCAGCAGAG |
| | | GCCAGGACAGGCGCCCCGCCTGCTGATCTACGGTGCTTCCCAACGCGCCACTG |
| | | GCATTCCTGACCGGTTCAGCGGCAGAGGGTCGGGAACCGATTTCACACTGACC |
| | | ATTTCCCGGGTGGAGCCCGAAGATTCGGCAGTCTACTACTGTCAGCATTACGA |
| | | GTCCTCCCCTTCATGGACCTTCGGTCAAGGGACCAAAGTGGAGATCAAG |
| BCMA_EBB- | 1137 | EVQLVESGGGLVQPGRSLRLSCTASGFTFDDYAMHWVRQRPGKGLEWVASINW |
| C1979-C12 - aa | | KGNSLAYGDSVKGRFAISRDNAKNTVFLQMNSLRTEDTAVYYCASHQGVAYYN |
| VH | | YAMDVWGRGTLVTVSS |
| BCMA_EBB- | 1138 | EIVLTQSPGTLSLSPGERATLSCRATQSIGSSFLAWYQQRPGQAPRLLIYGAS |
| C1979-C12 - aa | | QRATGIPDRFSGRGSGTDFTLTISRVEPEDSAVYYCQHYESSPSWTFGQGTKV |
| VL | | EIK |
| BCMA_EBB- | 1139 | MALPVTALLLPLALLLHAARPEVQLVESGGGLVQPGRSLRLSCTASGFTFDDY |
| C1979-C12 - aa | | AMHWVRQRPGKGLEWVASINWKGNSLAYGDSVKGRFAISRDNAKNTVFLQMNS |
| Full CART | | LRTEDTAVYYCASHQGVAYYNYAMDVWGRGTLVTVSSGGGGSGGGGSGGGGSE |
| | | IVLTQSPGTLSLSPGERATLSCRATQSIGSSFLAWYQQRPGQAPRLLIYGASQ |
| | | RATGIPDRFSGRGSGTDFTLTISRVEPEDSAVYYCQHYESSPSWTFGQGTKVE |
| | | IKTTTPAPRPPTPAPTIASQPLSLRPEACRPAAGGAVHTRGLDFACDIYIWAP |
| | | LAGTCGVLLLSLVITLYCKRGRKKLLYIFKQPFMRPVQTTQEEDGCSCRFPEE |
| | | EEGGCELRVKFSRSADAPAYKQGQNQLYNELNLGRREEYDVLDKRRGRDPEMG |
| | | GKPRRKNPQEGLYNELQKDKMAEAYSEIGMKGERRRGKGHDGLYQGLSTATKD |
| | | TYDALHMQALPPR |
| BCMA_EBB- | 1140 | ATGGCCCTCCCTGTCACCGCCCTGCTGCTTCCGCTGGCTCTTCTGCTCCACGC |
| C1979-C12 - nt | | CGCTCGGCCCGAAGTGCAGCTCGTGGAGAGCGGGGGAGGATTGGTGCAGCCCG |
| Full CART | | GAAGGTCCCTGCGGCTCTCCTGCACTGCGTCTGGCTTCACCTTCGACGACTAC |
| | | GCGATGCACTGGGTCAGACAGCGCCCGGGAAAGGGCCTGGAATGGGTCGCCTC |
| | | AATCAACTGGAAGGGAAACTCCCTGGCCTATGGCGACAGCGTGAAGGGCCGCT |
| | | TCGCCATTTCGCGCGACAACGCCAAGAACACCGTGTTTCTGCAAATGAATTCC |
| | | CTGCGGACCGAGGATACCGCTGTGTACTACTGCGCCAGCCACCAGGGCGTGGC |
| | | ATACTATAACTACGCCATGGACGTGTGGGGAAGAGGGACGCTCGTCACCGTGT |
| | | CCTCCGGGGGCGGTGGATCGGGTGGAGGAGGAAGCGGTGGCGGGGGCAGCGAA |
| | | ATCGTGCTGACTCAGAGCCCGGGAACTCTTTCACTGTCCCCGGGAGAACGGGC |
| | | CACTCTCTCGTGCCGGGCCACCCAGTCCATCGGCTCCTCCTTCCTTGCCTGGT |
| | | ACCAGCAGAGGCCAGGACAGGCGCCCCGCCTGCTGATCTACGGTGCTTCCCAA |
| | | CGCGCCACTGGCATTCCTGACCGGTTCAGCGGCAGAGGGTCGGGAACCGATTT |
| | | CACACTGACCATTTCCCGGGTGGAGCCCGAAGATTCGGCAGTCTACTACTGTC |
| | | AGCATTACGAGTCCTCCCCTTCATGGACCTTCGGTCAAGGGACCAAAGTGGAG |
| | | ATCAAGACCACTACCCCAGCACCGAGGCCACCCACCCCGGCTCCTACCATCGC |
| | | CTCCCAGCCTCTGTCCCTGCGTCCGGAGGCATGTAGACCCGCAGCTGGTGGGG |
| | | CCGTGCATACCCGGGGTCTTGACTTCGCCTGCGATATCTACATTTGGGCCCCT |
| | | CTGGCTGGTACTTGCGGGGTCCTGCTGCTTTCACTCGTGATCACTCTTTACTG |
| | | TAAGCGCGGTCGGAAGAAGCTGCTGTACATCTTTAAGCAACCCTTCATGAGGC |
| | | CTGTGCAGACTACTCAAGAGGAGGACGGCTGTTCATGCCGGTTCCCAGAGGAG |
| | | GAGGAAGGCGGCTGCGAACTGCGCGTGAAATTCAGCCGCAGCGCAGATGCTCC |
| | | AGCCTACAAGCAGGGGCAGAACCAGCTCTACAACGAACTCAATCTTGGTCGGA |
| | | GAGAGGAGTACGACGTGCTGGACAAGCGGAGAGGACGGGACCCAGAAATGGGC |
| | | GGGAAGCCGCGCAGAAAGAATCCCCAAGAGGGCCTGTACAACGAGCTCCAAAA |
| | | GGATAAGATGGCAGAAGCCTATAGCGAGATTGGTATGAAAGGGGAACGCAGAA |
| | | GAGGCAAAGGCCACGACGGACTGTACCAGGGACTCAGCACCGCCACCAAGGAC |
| | | ACCTATGACGCTCTTCACATGCAGGCCCTGCCGCCTCGG |

BCMA_EBB-C1980-G4

| | | |
|---|---|---|
| BCMA_EBB- | 1141 | EVQLVESGGGLVQPGGSLRLSCAASGFTFSSYAMSWVRQAPGKGLEWVSAISG |
| C1980-G4- aa | | SGGSTYYADSVKGRFTISRDNSKNTLYLQMNSLRAEDTAVYYCAKVVRDGMDV |
| ScFv domain | | WGQGTTVTVSSGGGGSGGGGSGGGGSEIVLTQSPATLSLSPGERATLSCRASQ |
| | | SVSSSYLAWYQQKPGQAPRLLIYGASSRATGIPDRFSGNGSGTDFTLTISRLE |
| | | PEDFAVYYCQQYGSPPRFTFGPGTKVDIK |
| BCMA_EBB- | 1142 | GAGGTGCAGTTGGTCGAAAGCGGGGGCGGGCTTGTGCAGCCTGGCGGATCACT |
| C1980-G4- nt | | GCGGCTGTCCTGCGCGGCATCAGGCTTCACGTTTTCTTCCTACGCCATGTCCT |
| ScFv domain | | GGGTGCGCCAGGCCCCTGGAAAGGGACTGGAATGGGTGTCCGCGATTTCGGGG |
| | | TCCGGCGGGAGCACCTACTACGCCGATTCCGTGAAGGGCCGCTTCACTATCTC |
| | | GCGGGACAACTCCAAGAACACCCTCTACCTCCAAATGAATAGCCTGCGGGCCG |
| | | AGGATACCGCCGTCTACTATTGCGCTAAGGTCGTGCGCGACGGAATGGACGTG |
| | | TGGGGACAGGGTACCACCGTGACAGTGTCCTCGGGGGGAGGCGGTAGCGGCGG |
| | | AGGAGGAAGCGGTGGTGGAGGTTCCGAGATTGTGCTGACTCAATCACCCGCGA |
| | | CCCTGAGCCTGTCCCCCGGCGAAAGGGCCACTCTGTCCTGTCGGGCCAGCCAA |
| | | TCAGTCTCCTCCTCGTACCTGGCCTGGTACCAGCAGAAGCCAGGACAGGCTCC |
| | | GAGACTCCTTATCTATGGCGCATCCTCCCGCGCCACCGGAATCCCGGATAGGT |
| | | TCTCGGGAAACGGATCGGGGACCGACTTCACTCTCACCATCTCCCGGCTGGAA |
| | | CCGGAGGACTTCGCCGTGTACTACTGCCAGCAGTACGGCAGCCCGCCTAGATT |
| | | CACTTTCGGCCCCGGCACCAAAGTGGACATCAAG |
| BCMA_EBB- | 1143 | EVQLVESGGGLVQPGGSLRLSCAASGFTFSSYAMSWVRQAPGKGLEWVSAISG |
| C1980-G4- aa | | SGGSTYYADSVKGRFTISRDNSKNTLYLQMNSLRAEDTAVYYCAKVVRDGMDV |
| VH | | WGQGTTVTVSS |
| BCMA_EBB- | 1144 | EIVLTQSPATLSLSPGERATLSCRASQSVSSSYLAWYQQKPGQAPRLLIYGAS |
| C1980-G4- aa | | SRATGIPDRFSGNGSGTDFTLTISRLEPEDFAVYYCQQYGSPPRFTFGPGTKV |
| VL | | DIK |
| BCMA_EBB- | 1145 | MALPVTALLLPLALLLHAARPEVQLVESGGGLVQPGGSLRLSCAASGFTFSSY |
| C1980-G4- aa | | AMSWVRQAPGKGLEWVSAISGSGGSTYYADSVKGRFTISRDNSKNTLYLQMNS |
| Full CART | | LRAEDTAVYYCAKVVRDGMDVWGQGTTVTVSSGGGGSGGGGSGGGGSEIVLTQ |
| | | SPATLSLSPGERATLSCRASQSVSSSYLAWYQQKPGQAPRLLIYGASSRATGI |
| | | PDRFSGNGSGTDFTLTISRLEPEDFAVYYCQQYGSPPRFTFGPGTKVDIKTTT |
| | | PAPRPPTPAPTIASQPLSLRPEACRPAAGGAVHTRGLDFACDIYIWAPLAGTC |
| | | GVLLLSLVITLYCKRGRKKLLYIFKQPFMRPVQTTQEEDGCSCRFPEEEEGGC |
| | | ELRVKFSRSADAPAYKQGQNQLYNELNLGRREEYDVLDKRRGRDPEMGGKPRR |
| | | KNPQEGLYNELQKDKMAEAYSEIGMKGERRRGKGHDGLYQGLSTATKDTYDAL |
| | | HMQALPPR |
| BCMA_EBB- | 1146 | ATGGCCCTCCCTGTCACCGCCCTGCTGCTTCCGCTGGCTCTTCTGCTCCACGC |
| C1980-G4- nt | | CGCTCGGCCCGAGGTGCAGTTGGTCGAAAGCGGGGGCGGGCTTGTGCAGCCTG |
| Full CART | | GCGGATCACTGCGGCTGTCCTGCGCGGCATCAGGCTTCACGTTTTCTTCCTAC |
| | | GCCATGTCCTGGGTGCGCCAGGCCCCTGGAAAGGGACTGGAATGGGTGTCCGC |
| | | GATTTCGGGGTCCGGCGGGAGCACCTACTACGCCGATTCCGTGAAGGGCCGCT |
| | | TCACTATCTCGCGGGACAACTCCAAGAACACCCTCTACCTCCAAATGAATAGC |
| | | CTGCGGGCCGAGGATACCGCCGTCTACTATTGCGCTAAGGTCGTGCGCGACGG |
| | | AATGGACGTGTGGGGACAGGGTACCACCGTGACAGTGTCCTCGGGGGGAGGCG |
| | | GTAGCGGCGGAGGAGGAAGCGGTGGTGGAGGTTCCGAGATTGTGCTGACTCAA |
| | | TCACCCGCGACCCTGAGCCTGTCCCCCGGCGAAAGGGCCACTCTGTCCTGTCG |
| | | GGCCAGCCAATCAGTCTCCTCCTCGTACCTGGCCTGGTACCAGCAGAAGCCAG |
| | | GACAGGCTCCGAGACTCCTTATCTATGGCGCATCCTCCCGCGCCACCGGAATC |
| | | CCGGATAGGTTCTCGGGAAACGGATCGGGGACCGACTTCACTCTCACCATCTC |
| | | CCGGCTGGAACCGGAGGACTTCGCCGTGTACTACTGCCAGCAGTACGGCAGCC |
| | | CGCCTAGATTCACTTTCGGCCCCGGCACCAAAGTGGACATCAAGACCACTACC |
| | | CCAGCACCGAGGCCACCCACCCCGGCTCCTACCATCGCCTCCCAGCCTCTGTC |
| | | CCTGCGTCCGGAGGCATGTAGACCCGCAGCTGGTGGGGCCGTGCATACCCGGG |
| | | GTCTTGACTTCGCCTGCGATATCTACATTTGGGCCCCTCTGGCTGGTACTTGC |
| | | GGGGTCCTGCTGCTTTCACTCGTGATCACTCTTTACTGTAAGCGCGGTCGGAA |
| | | GAAGCTGCTGTACATCTTTAAGCAACCCTTCATGAGGCCTGTGCAGACTACTC |
| | | AAGAGGAGGACGGCTGTTCATGCCGGTTCCCAGAGGAGGAGGAAGGCGGCTGC |
| | | GAACTGCGCGTGAAATTCAGCCGCAGCGCAGATGCTCCAGCCTACAAGCAGGG |
| | | GCAGAACCAGCTCTACAACGAACTCAATCTTGGTCGGAGAGAGGAGTACGACG |
| | | TGCTGGACAAGCGGAGAGGACGGGACCCAGAAATGGGCGGGAAGCCGCGCAGA |
| | | AAGAATCCCCAAGAGGGCCTGTACAACGAGCTCCAAAAGGATAAGATGGCAGA |
| | | AGCCTATAGCGAGATTGGTATGAAAGGGGAACGCAGAAGAGGCAAAGGCCACG |
| | | ACGGACTGTACCAGGGACTCAGCACCGCCACCAAGGACACCTATGACGCTCTT |
| | | CACATGCAGGCCCTGCCGCCTCGG |

BCMA_EBB-C1980-D2

| | | |
|---|---|---|
| BCMA_EBB- | 1147 | EVQLLESGGGLVQPGGSLRLSCAASGFTFSSYAMSWVRQAPGKGLEWVSAISG |
| C1980-D2- aa | | SGGSTYYADSVKGRFTISRDNSKNTLYLQMNSLRAEDTAVYYCAKIPQTGTFD |
| ScFv domain | | YWGQGTLVTVSSGGGGSGGGGSGGGGSEIVLTQSPGTLSLSPGERATLSCRAS |
| | | QSVSSSYLAWYQQRPGQAPRLLIYGASSRATGIPDRFSGSGSGTDFTLTISRL |
| | | EPEDFAVYYCQHYGSSPSWTFGQGTRLEIK |
| BCMA_EBB- | 1148 | GAAGTGCAGCTGCTGGAGTCCGGCGGTGGATTGGTGCAACCGGGGGGATCGCT |
| C1980-D2- nt | | CAGACTGTCCTGTGCGGCGTCAGGCTTCACCTTCTCGAGCTACGCCATGTCAT |
| ScFv domain | | GGGTCAGACAGGCCCCTGGAAAGGGTCTGGAATGGGTGTCCGCCATTTCCGGG |
| | | AGCGGGGGATCTACATACTACGCCGATAGCGTGAAGGGCCGCTTCACCATTTC |
| | | CCGGGACAACTCCAAGAACACTCTCTATCTGCAAATGAACTCCCTCCGCGCTG |
| | | AGGACACTGCCGTGTACTACTGCGCCAAAATCCCTCAGACCGGCACCTTCGAC |
| | | TACTGGGGACAGGGGACTCTGGTCACCGTCAGCAGCGGTGGCGGAGGTTCGGG |
| | | GGGAGGAGGAAGCGGCGGCGGAGGGTCCGAGATTGTGCTGACCCAGTCACCCG |
| | | GCACTTTGTCCCTGTCGCCTGGAGAAAGGGCCACCCTTTCCTGCCGGGCATCC |
| | | CAATCCGTGTCCTCCTCGTACCTGGCCTGGTACCAGCAGAGGCCCGGACAGGC |
| | | CCCACGGCTTCTGATCTACGGAGCAAGCAGCCGCGCGACCGGTATCCCGGACC |
| | | GGTTTTCGGGCTCGGGCTCAGGAACTGACTTCACCCTCACCATCTCCCGCCTG |
| | | GAACCCGAAGATTTCGCTGTGTATTACTGCCAGCACTACGGCAGCTCCCCGTC |
| | | CTGGACGTTCGGCCAGGGAACTCGGCTGGAGATCAAG |
| BCMA_EBB- | 1149 | EVQLLESGGGLVQPGGSLRLSCAASGFTFSSYAMSWVRQAPGKGLEWVSAISG |
| C1980-D2- aa | | SGGSTYYADSVKGRFTISRDNSKNTLYLQMNSLRAEDTAVYYCAKIPQTGTFD |
| VH | | YWGQGTLVTVSS |
| BCMA_EBB- | 1150 | EIVLTQSPGTLSLSPGERATLSCRASQSVSSSYLAWYQQRPGQAPRLLIYGAS |
| C1980-D2- aa | | SRATGIPDRFSGSGSGTDFTLTISRLEPEDFAVYYCQHYGSSPSWTFGQGTRL |
| VL | | EIK |
| BCMA_EBB- | 1151 | MALPVTALLLPLALLLHAARPEVQLLESGGGLVQPGGSLRLSCAASGFTFSSY |
| C1980-D2- aa | | AMSWVRQAPGKGLEWVSAISGSGGSTYYADSVKGRFTISRDNSKNTLYLQMNS |
| Full CART | | LRAEDTAVYYCAKIPQTGTFDYWGQGTLVTVSSGGGGSGGGGSGGGGSEIVLT |
| | | QSPGTLSLSPGERATLSCRASQSVSSSYLAWYQQRPGQAPRLLIYGASSRATG |
| | | IPDRFSGSGSGTDFTLTISRLEPEDFAVYYCQHYGSSPSWTFGQGTRLEIKTT |
| | | TPAPRPPTPAPTIASQPLSLRPEACRPAAGGAVHTRGLDFACDIYIWAPLAGT |
| | | CGVLLLSLVITLYCKRGRKKLLYIFKQPFMRPVQTTQEEDGCSCRFPEEEEGG |
| | | CELRVKFSRSADAPAYKQGQNQLYNELNLGRREEYDVLDKRRGRDPEMGGKPR |
| | | RKNPQEGLYNELQKDKMAEAYSEIGMKGERRRGKGHDGLYQGLSTATKDTYDA |
| | | LHMQALPPR |
| BCMA_EBB- | 1152 | ATGGCCCTCCCTGTCACCGCCCTGCTGCTTCCGCTGGCTCTTCTGCTCCACGC |
| C1980-D2- nt | | CGCTCGGCCCGAAGTGCAGCTGCTGGAGTCCGGCGGTGGATTGGTGCAACCGG |
| Full CART | | GGGGATCGCTCAGACTGTCCTGTGCGGCGTCAGGCTTCACCTTCTCGAGCTAC |
| | | GCCATGTCATGGGTCAGACAGGCCCCTGGAAAGGGTCTGGAATGGGTGTCCGC |
| | | CATTTCCGGGAGCGGGGGATCTACATACTACGCCGATAGCGTGAAGGGCCGCT |
| | | TCACCATTTCCCGGGACAACTCCAAGAACACTCTCTATCTGCAAATGAACTCC |
| | | CTCCGCGCTGAGGACACTGCCGTGTACTACTGCGCCAAAATCCCTCAGACCGG |
| | | CACCTTCGACTACTGGGGACAGGGGACTCTGGTCACCGTCAGCAGCGGTGGCG |
| | | GAGGTTCGGGGGGAGGAGGAAGCGGCGGCGGAGGGTCCGAGATTGTGCTGACC |
| | | CAGTCACCCGGCACTTTGTCCCTGTCGCCTGGAGAAAGGGCCACCCTTTCCTG |
| | | CCGGGCATCCCAATCCGTGTCCTCCTCGTACCTGGCCTGGTACCAGCAGAGGC |
| | | CCGGACAGGCCCCACGGCTTCTGATCTACGGAGCAAGCAGCCGCGCGACCGGT |
| | | ATCCCGGACCGGTTTTCGGGCTCGGGCTCAGGAACTGACTTCACCCTCACCAT |
| | | CTCCCGCCTGGAACCCGAAGATTTCGCTGTGTATTACTGCCAGCACTACGGCA |
| | | GCTCCCCGTCCTGGACGTTCGGCCAGGGAACTCGGCTGGAGATCAAGACCACT |
| | | ACCCCAGCACCGAGGCCACCCACCCCGGCTCCTACCATCGCCTCCCAGCCTCT |
| | | GTCCCTGCGTCCGGAGGCATGTAGACCCGCAGCTGGTGGGGCCGTGCATACCC |
| | | GGGGTCTTGACTTCGCCTGCGATATCTACATTTGGGCCCCTCTGGCTGGTACT |
| | | TGCGGGGTCCTGCTGCTTTCACTCGTGATCACTCTTTACTGTAAGCGCGGTCG |
| | | GAAGAAGCTGCTGTACATCTTTAAGCAACCCTTCATGAGGCCTGTGCAGACTA |
| | | CTCAAGAGGAGGACGGCTGTTCATGCCGGTTCCCAGAGGAGGAGGAAGGCGGC |
| | | TGCGAACTGCGCGTGAAATTCAGCCGCAGCGCAGATGCTCCAGCCTACAAGCA |
| | | GGGGCAGAACCAGCTCTACAACGAACTCAATCTTGGTCGGAGAGAGGAGTACG |
| | | ACGTGCTGGACAAGCGGAGAGGACGGGACCCAGAAATGGGCGGGAAGCCGCGC |
| | | AGAAAGAATCCCCAAGAGGGCCTGTACAACGAGCTCCAAAAGGATAAGATGGC |
| | | AGAAGCCTATAGCGAGATTGGTATGAAAGGGGAACGCAGAAGAGGCAAAGGCC |
| | | ACGACGGACTGTACCAGGGACTCAGCACCGCCACCAAGGACACCTATGACGCT |
| | | CTTCACATGCAGGCCCTGCCGCCTCGG |

BCMA_EBB-C1978-A10

| | | |
|---|---|---|
| BCMA_EBB- | 1153 | EVQLVETGGGLVQPGGSLRLSCAASGFTFSSYAMSWVRQAPGKGLEWVSAISG |
| C1978-A10- aa | | SGGSTYYADSVKGRFTMSRENDKNSVFLQMNSLRVEDTGVYYCARANYKRELR |
| ScFv domain | | YYYGMDVWGQGTMVTVSSGGGGSGGGGSGGGGSEIVMTQSPGTLSLSPGESAT |
| | | LSCRASQRVASNYLAWYQHKPGQAPSLLISGASSRATGVPDRFSGSGSGTDFT |
| | | LAISRLEPEDSAVYYCQHYDSSPSWTFGQGTKVEIK |
| BCMA_EBB- | 1154 | GAAGTGCAACTGGTGGAAACCGGTGGAGGACTCGTGCAGCCTGGCGGCAGCCT |
| C1978-A10- nt | | CCGGCTGAGCTGCGCCGCTTCGGGATTCACCTTTTCCTCCTACGCGATGTCTT |
| ScFv domain | | GGGTCAGACAGGCCCCCGGAAAGGGGCTGGAATGGGTGTCAGCCATCTCCGGC |
| | | TCCGGCGGATCAACGTACTACGCCGACTCCGTGAAAGGCCGGTTCACCATGTC |
| | | GCGCGAGAATGACAAGAACTCCGTGTTCCTGCAAATGAACTCCCTGAGGGTGG |
| | | AGGACACCGGAGTGTACTATTGTGCGCGCGCCAACTACAAGAGAGAGCTGCGG |
| | | TACTACTACGGAATGGACGTCTGGGGACAGGGAACTATGGTGACCGTGTCATC |
| | | CGGTGGAGGGGGAAGCGGCGGTGGAGGCAGCGGGGGCGGGGGTTCAGAAATTG |
| | | TCATGACCCAGTCCCCGGGAACTCTTTCCCTCTCCCCCGGGGAATCCGCGACT |
| | | TTGTCCTGCCGGGCCAGCCAGCGCGTGGCCTCGAACTACCTCGCATGGTACCA |
| | | GCATAAGCCAGGCCAAGCCCCTTCCCTGCTGATTTCCGGGGCTAGCAGCCGCG |
| | | CCACTGGCGTGCCGGATAGGTTCTCGGGAAGCGGCTCGGGTACCGATTTCACC |
| | | CTGGCAATCTCGCGGCTGGAACCGGAGGATTCGGCCGTGTACTACTGCCAGCA |
| | | CTATGACTCATCCCCCTCCTGGACATTCGGACAGGGCACCAAGGTCGAGATCA |
| | | AG |
| BCMA_EBB- | 1155 | EVQLVETGGGLVQPGGSLRLSCAASGFTFSSYAMSWVRQAPGKGLEWVSAISG |
| C1978-A10- aa | | SGGSTYYADSVKGRFTMSRENDKNSVFLQMNSLRVEDTGVYYCARANYKRELR |
| VH | | YYYGMDVWGQGTMVTVSS |
| BCMA_EBB- | 1156 | EIVMTQSPGTLSLSPGESATLSCRASQRVASNYLAWYQHKPGQAPSLLISGAS |
| C1978-A10- aa | | SRATGVPDRFSGSGSGTDFTLAISRLEPEDSAVYYCQHYDSSPSWTFGQGTKV |
| VL | | EIK |
| BCMA_EBB- | 1157 | MALPVTALLLPLALLLHAARPEVQLVETGGGLVQPGGSLRLSCAASGFTFSSY |
| C1978-A10- aa | | AMSWVRQAPGKGLEWVSAISGSGGSTYYADSVKGRFTMSRENDKNSVFLQMNS |
| Full | CART | LRVEDTGVYYCARANYKRELRYYYGMDVWGQGTMVTVSSGGGGSGGGGSGGGG |
| | | SEIVMTQSPGTLSLSPGESATLSCRASQRVASNYLAWYQHKPGQAPSLLISGA |
| | | SSRATGVPDRFSGSGSGTDFTLAISRLEPEDSAVYYCQHYDSSPSWTFGQGTK |
| | | VEIKTTTPAPRPPTPAPTIASQPLSLRPEACRPAAGGAVHTRGLDFACDIYIW |
| | | APLAGTCGVLLLSLVITLYCKRGRKKLLYIFKQPFMRPVQTTQEEDGCSCRFP |
| | | EEEEGGCELRVKFSRSADAPAYKQGQNQLYNELNLGRREEYDVLDKRRGRDPE |
| | | MGGKPRRKNPQEGLYNELQKDKMAEAYSEIGMKGERRRGKGHDGLYQGLSTAT |
| | | KDTYDALHMQALPPR |
| BCMA_EBB- | 1158 | ATGGCCCTCCCTGTCACCGCCCTGCTGCTTCCGCTGGCTCTTCTGCTCCACGC |
| C1978-A10- nt | | CGCTCGGCCCGAAGTGCAACTGGTGGAAACCGGTGGAGGACTCGTGCAGCCTG |
| Full CART | | GCGGCAGCCTCCGGCTGAGCTGCGCCGCTTCGGGATTCACCTTTTCCTCCTAC |
| | | GCGATGTCTTGGGTCAGACAGGCCCCCGGAAAGGGGCTGGAATGGGTGTCAGC |
| | | CATCTCCGGCTCCGGCGGATCAACGTACTACGCCGACTCCGTGAAAGGCCGGT |
| | | TCACCATGTCGCGCGAGAATGACAAGAACTCCGTGTTCCTGCAAATGAACTCC |
| | | CTGAGGGTGGAGGACACCGGAGTGTACTATTGTGCGCGCGCCAACTACAAGAG |
| | | AGAGCTGCGGTACTACTACGGAATGGACGTCTGGGGACAGGGAACTATGGTGA |
| | | CCGTGTCATCCGGTGGAGGGGGAAGCGGCGGTGGAGGCAGCGGGGGCGGGGGT |
| | | TCAGAAATTGTCATGACCCAGTCCCCGGGAACTCTTTCCCTCTCCCCCGGGGA |
| | | ATCCGCGACTTTGTCCTGCCGGGCCAGCCAGCGCGTGGCCTCGAACTACCTCG |
| | | CATGGTACCAGCATAAGCCAGGCCAAGCCCCTTCCCTGCTGATTTCCGGGGCT |
| | | AGCAGCCGCGCCACTGGCGTGCCGGATAGGTTCTCGGGAAGCGGCTCGGGTAC |
| | | CGATTTCACCCTGGCAATCTCGCGGCTGGAACCGGAGGATTCGGCCGTGTACT |
| | | ACTGCCAGCACTATGACTCATCCCCCTCCTGGACATTCGGACAGGGCACCAAG |
| | | GTCGAGATCAAGACCACTACCCCAGCACCGAGGCCACCCACCCCGGCTCCTAC |
| | | CATCGCCTCCCAGCCTCTGTCCCTGCGTCCGGAGGCATGTAGACCCGCAGCTG |
| | | GTGGGGCCGTGCATACCCGGGGTCTTGACTTCGCCTGCGATATCTACATTTGG |
| | | GCCCCTCTGGCTGGTACTTGCGGGGTCCTGCTGCTTTCACTCGTGATCACTCT |
| | | TTACTGTAAGCGCGGTCGGAAGAAGCTGCTGTACATCTTTAAGCAACCCTTCA |
| | | TGAGGCCTGTGCAGACTACTCAAGAGGAGGACGGCTGTTCATGCCGGTTCCCA |
| | | GAGGAGGAGGAAGGCGGCTGCGAACTGCGCGTGAAATTCAGCCGCAGCGCAGA |
| | | TGCTCCAGCCTACAAGCAGGGGCAGAACCAGCTCTACAACGAACTCAATCTTG |
| | | GTCGGAGAGAGGAGTACGACGTGCTGGACAAGCGGAGAGGACGGGACCCAGAA |
| | | ATGGGCGGGAAGCCGCGCAGAAAGAATCCCCAAGAGGGCCTGTACAACGAGCT |
| | | CCAAAAGGATAAGATGGCAGAAGCCTATAGCGAGATTGGTATGAAAGGGGAAC |
| | | GCAGAAGAGGCAAAGGCCACGACGGACTGTACCAGGGACTCAGCACCGCCACC |
| | | AAGGACACCTATGACGCTCTTCACATGCAGGCCCTGCCGCCTCGG |

BCMA_EBB-C1978-D4

| | | |
|---|---|---|
| BCMA_EBB- | 1159 | EVQLLETGGGLVQPGGSLRLSCAASGFSFSSYAMSWVRQAPGKGLEWVSAISG |
| C1978-D4- aa | | SGGSTYYADSVKGRFTISRDNSKNTLYLQMNSLRAEDTAVYYCAKALVGATGA |
| ScFv domain | | FDIWGQGTLVTVSSGGGGSGGGGSGGGGSEIVLTQSPGTLSLSPGERATLSCR |
| | | ASQSLSSNFLAWYQQKPGQAPGLLIYGASNWATGTPDRFSGSGSGTDFTLTIT |
| | | RLEPEDFAVYYCQYYGTSPMYTFGQGTKVEIK |
| BCMA_EBB- | 1160 | GAAGTGCAGCTGCTCGAAACCGGTGGAGGGCTGGTGCAGCCAGGGGGCTCCCT |
| C1978-D4- nt | | GAGGCTTTCATGCGCCGCTAGCGGATTCTCCTTCTCCTCTTACGCCATGTCGT |
| ScFv domain | | GGGTCCGCCAAGCCCCTGGAAAAGGCCTGGAATGGGTGTCCGCGATTTCCGGG |
| | | AGCGGAGGTTCGACCTATTACGCCGACTCCGTGAAGGGCCGCTTTACCATCTC |
| | | CCGGGATAACTCCAAGAACACTCTGTACCTCCAAATGAACTCGCTGAGAGCCG |
| | | AGGACACCGCCGTGTATTACTGCGCGAAGGCGCTGGTCGGCGCGACTGGGGCA |
| | | TTCGACATCTGGGGACAGGGAACTCTTGTGACCGTGTCGAGCGGAGGCGGCGG |
| | | CTCCGGCGGAGGAGGGAGCGGGGGCGGTGGTTCCGAAATCGTGTTGACTCAGT |
| | | CCCCGGGAACCCTGAGCTTGTCACCCGGGGAGCGGGCCACTCTCTCCTGTCGC |
| | | GCCTCCCAATCGCTCTCATCCAATTTCCTGGCCTGGTACCAGCAGAAGCCCGG |
| | | ACAGGCCCCGGGCCTGCTCATCTACGGCGCTTCAAACTGGGCAACGGGAACCC |
| | | CTGATCGGTTCAGCGGAAGCGGATCGGGTACTGACTTTACCCTGACCATCACC |
| | | AGACTGGAACCGGAGGACTTCGCCGTGTACTACTGCCAGTACTACGGCACCTC |
| | | CCCCATGTACACATTCGGACAGGGTACCAAGGTCGAGATTAAG |
| BCMA_EBB- | 1161 | EVQLLETGGGLVQPGGSLRLSCAASGFSFSSYAMSWVRQAPGKGLEWVSAISG |
| C1978-D4- aa | | SGGSTYYADSVKGRFTISRDNSKNTLYLQMNSLRAEDTAVYYCAKALVGATGA |
| VH | | FDIWGQGTLVTVSS |
| BCMA_EBB- | 1162 | EIVLTQSPGTLSLSPGERATLSCRASQSLSSNFLAWYQQKPGQAPGLLIYGAS |
| C1978-D4- aa | | NWATGTPDRFSGSGSGTDFTLTITRLEPEDFAVYYCQYYGTSPMYTFGQGTKV |
| VL | | EIK |
| BCMA_EBB- | 1163 | MALPVTALLLPLALLLHAARPEVQLLETGGGLVQPGGSLRLSCAASGFSFSSY |
| C1978-D4- aa | | AMSWVRQAPGKGLEWVSAISGSGGSTYYADSVKGRFTISRDNSKNTLYLQMNS |
| Full CART | | LRAEDTAVYYCAKALVGATGAFDIWGQGTLVTVSSGGGGSGGGGSGGGGSEIV |
| | | LTQSPGTLSLSPGERATLSCRASQSLSSNFLAWYQQKPGQAPGLLIYGASNWA |
| | | TGTPDRFSGSGSGTDFTLTITRLEPEDFAVYYCQYYGTSPMYTFGQGTKVEIK |
| | | TTTPAPRPPTPAPTIASQPLSLRPEACRPAAGGAVHTRGLDFACDIYIWAPLA |
| | | GTCGVLLLSLVITLYCKRGRKKLLYIFKQPFMRPVQTTQEEDGCSCRFPEEEE |
| | | GGCELRVKFSRSADAPAYKQGQNQLYNELNLGRREEYDVLDKRRGRDPEMGGK |
| | | PRRKNPQEGLYNELQKDKMAEAYSEIGMKGERRRGKGHDGLYQGLSTATKDTY |
| | | DALHMQALPPR |
| BCMA_EBB- | 1164 | ATGGCCCTCCCTGTCACCGCCCTGCTGCTTCCGCTGGCTCTTCTGCTCCACGC |
| C1978-D4- nt | | CGCTCGGCCCGAAGTGCAGCTGCTCGAAACCGGTGGAGGGCTGGTGCAGCCAG |
| Full CART | | GGGGCTCCCTGAGGCTTTCATGCGCCGCTAGCGGATTCTCCTTCTCCTCTTAC |
| | | GCCATGTCGTGGGTCCGCCAAGCCCCTGGAAAAGGCCTGGAATGGGTGTCCGC |
| | | GATTTCCGGGAGCGGAGGTTCGACCTATTACGCCGACTCCGTGAAGGGCCGCT |
| | | TTACCATCTCCCGGGATAACTCCAAGAACACTCTGTACCTCCAAATGAACTCG |
| | | CTGAGAGCCGAGGACACCGCCGTGTATTACTGCGCGAAGGCGCTGGTCGGCGC |
| | | GACTGGGGCATTCGACATCTGGGGACAGGGAACTCTTGTGACCGTGTCGAGCG |
| | | GAGGCGGCGGCTCCGGCGGAGGAGGGAGCGGGGGCGGTGGTTCCGAAATCGTG |
| | | TTGACTCAGTCCCCGGGAACCCTGAGCTTGTCACCCGGGGAGCGGGCCACTCT |
| | | CTCCTGTCGCGCCTCCCAATCGCTCTCATCCAATTTCCTGGCCTGGTACCAGC |
| | | AGAAGCCCGGACAGGCCCCGGGCCTGCTCATCTACGGCGCTTCAAACTGGGCA |
| | | ACGGGAACCCCTGATCGGTTCAGCGGAAGCGGATCGGGTACTGACTTTACCCT |
| | | GACCATCACCAGACTGGAACCGGAGGACTTCGCCGTGTACTACTGCCAGTACT |
| | | ACGGCACCTCCCCCATGTACACATTCGGACAGGGTACCAAGGTCGAGATTAAG |
| | | ACCACTACCCCAGCACCGAGGCCACCCACCCCGGCTCCTACCATCGCCTCCCA |
| | | GCCTCTGTCCCTGCGTCCGGAGGCATGTAGACCCGCAGCTGGTGGGGCCGTGC |
| | | ATACCCGGGGTCTTGACTTCGCCTGCGATATCTACATTTGGGCCCCTCTGGCT |
| | | GGTACTTGCGGGGTCCTGCTGCTTTCACTCGTGATCACTCTTTACTGTAAGCG |
| | | CGGTCGGAAGAAGCTGCTGTACATCTTTAAGCAACCCTTCATGAGGCCTGTGC |
| | | AGACTACTCAAGAGGAGGACGGCTGTTCATGCCGGTTCCCAGAGGAGGAGGAA |
| | | GGCGGCTGCGAACTGCGCGTGAAATTCAGCCGCAGCGCAGATGCTCCAGCCTA |
| | | CAAGCAGGGGCAGAACCAGCTCTACAACGAACTCAATCTTGGTCGGAGAGAGG |
| | | AGTACGACGTGCTGGACAAGCGGAGAGGACGGGACCCAGAAATGGGCGGGAAG |
| | | CCGCGCAGAAAGAATCCCCAAGAGGGCCTGTACAACGAGCTCCAAAAGGATAA |
| | | GATGGCAGAAGCCTATAGCGAGATTGGTATGAAAGGGGAACGCAGAAGAGGCA |
| | | AAGGCCACGACGGACTGTACCAGGGACTCAGCACCGCCACCAAGGACACCTAT |
| | | GACGCTCTTCACATGCAGGCCCTGCCGCCTCGG |

BCMA_EBB-C1980-A2

| | | |
|---|---|---|
| BCMA_EBB- | 1165 | EVQLLESGGGLVQPGGSLRLSCAASGFTFSSYAMSWVRQAPGKGLEWVSAISG |
| C1980-A2- aa | | SGGSTYYADSVKGRFTISRDNSKNTLYLQMNSLRAEDTAVYYCVLWFGEGFDP |
| ScFv domain | | WGQGTLVTVSSGGGGSGGGGSGGGGSDIVLTQSPLSLPVTPGEPASISCRSSQ |
| | | SLLHSNGYNYLDWYLQKPGQSPQLLIYLGSNRASGVPDRFSGSGSGTDFTLKI |
| | | SRVEAEDVGVYYCMQALQTPLTFGGGTKVD1K |
| BCMA_EBB- | 1166 | GAAGTGCAGCTGCTTGAGAGCGGTGGAGGTCTGGTGCAGCCCGGGGGATCACT |
| C1980-A2- nt | | GCGCCTGTCCTGTGCCGCGTCCGGTTTCACTTTCTCCTCGTACGCCATGTCGT |
| ScFv domain | | GGGTCAGACAGGCACCGGGAAAGGGACTGGAATGGGTGTCAGCCATTTCGGGT |
| | | TCGGGGGGCAGCACCTACTACGCTGACTCCGTGAAGGGCCGGTTCACCATTTC |
| | | CCGCGACAACTCCAAGAACACCTTGTACCTCCAAATGAACTCCCTGCGGGCCG |
| | | AAGATACCGCCGTGTATTACTGCGTGCTGTGGTTCGGAGAGGGATTCGACCCG |
| | | TGGGGACAAGGAACACTCGTGACTGTGTCATCCGGCGGAGGCGGCAGCGGTGG |
| | | CGGCGGTTCCGGCGGCGGCGGATCTGACATCGTGTTGACCCAGTCCCCTCTGA |
| | | GCCTGCCGGTCACTCCTGGCGAACCAGCCAGCATCTCCTGCCGGTCGAGCCAG |
| | | TCCCTCCTGCACTCCAATGGGTACAACTACCTCGATTGGTATCTGCAAAAGCC |
| | | GGGCCAGAGCCCCCAGCTGCTGATCTACCTTGGGTCAAACCGCGCTTCCGGGG |
| | | TGCCTGATAGATTCTCCGGGTCCGGGAGCGGAACCGACTTTACCCTGAAAATC |
| | | TCGAGGGTGGAGGCCGAGGACGTCGGAGTGTACTACTGCATGCAGGCGCTCCA |
| | | GACTCCCCTGACCTTCGGAGGAGGAACGAAGGTCGACATCAAGA |
| BCMA_EBB- | 1167 | EVQLLESGGGLVQPGGSLRLSCAASGFTFSSYAMSWVRQAPGKGLEWVSAISG |
| C1980-A2- aa | | SGGSTYYADSVKGRFTISRDNSKNTLYLQMNSLRAEDTAVYYCVLWFGEGFDP |
| VH | | WGQGTLVTVSS |
| BCMA_EBB- | 1168 | DIVLTQSPLSLPVTPGEPASISCRSSQSLLHSNGYNYLDWYLQKPGQSPQLLI |
| C1980-A2- aa | | YLGSNRASGVPDRFSGSGSGTDFTLKISRVEAEDVGVYYCMQALQTPLTFGGG |
| VL | | TKVDIK |
| BCMA_EBB- | 1169 | MALPVTALLLPLALLLHAARPEVQLLESGGGLVQPGGSLRLSCAASGFTFSSY |
| C1980-A2- aa | | AMSWVRQAPGKGLEWVSAISGSGGSTYYADSVKGRFTISRDNSKNTLYLQMNS |
| Full CART | | LRAEDTAVYYCVLWFGEGFDPWGQGTLVTVSSGGGGSGGGGSGGGGSDIVLTQ |
| | | SPLSLPVTPGEPASISCRSSQSLLHSNGYNYLDWYLQKPGQSPQLLIYLGSNR |
| | | ASGVPDRFSGSGSGTDFTLKISRVEAEDVGVYYCMQALQTPLTFGGGTKVDIK |
| | | TTTPAPRPPTPAPTIASQPLSLRPEACRPAAGGAVHTRGLDFACDIYIWAPLA |
| | | GTCGVLLLSLVITLYCKRGRKKLLYIFKQPFMRPVQTTQEEDGCSCRFPEEEE |
| | | GGCELRVKFSRSADAPAYKQGQNQLYNELNLGRREEYDVLDKRRGRDPEMGGK |
| | | PRRKNPQEGLYNELQKDKMAEAYSEIGMKGERRRGKGHDGLYQGLSTATKDTY |
| | | DALHMQALPPR |
| BCMA_EBB- | 1170 | ATGGCCCTCCCTGTCACCGCCCTGCTGCTTCCGCTGGCTCTTCTGCTCCACGC |
| C1980-A2- nt | | CGCTCGGCCCGAAGTGCAGCTGCTTGAGAGCGGTGGAGGTCTGGTGCAGCCCG |
| Full CART | | GGGGATCACTGCGCCTGTCCTGTGCCGCGTCCGGTTTCACTTTCTCCTCGTAC |
| | | GCCATGTCGTGGGTCAGACAGGCACCGGGAAAGGGACTGGAATGGGTGTCAGC |
| | | CATTTCGGGTTCGGGGGGCAGCACCTACTACGCTGACTCCGTGAAGGGCCGGT |
| | | TCACCATTTCCCGCGACAACTCCAAGAACACCTTGTACCTCCAAATGAACTCC |
| | | CTGCGGGCCGAAGATACCGCCGTGTATTACTGCGTGCTGTGGTTCGGAGAGGG |
| | | ATTCGACCCGTGGGGACAAGGAACACTCGTGACTGTGTCATCCGGCGGAGGCG |
| | | GCAGCGGTGGCGGCGGTTCCGGCGGCGGCGGATCTGACATCGTGTTGACCCAG |
| | | TCCCCTCTGAGCCTGCCGGTCACTCCTGGCGAACCAGCCAGCATCTCCTGCCG |
| | | GTCGAGCCAGTCCCTCCTGCACTCCAATGGGTACAACTACCTCGATTGGTATC |
| | | TGCAAAAGCCGGGCCAGAGCCCCCAGCTGCTGATCTACCTTGGGTCAAACCGC |
| | | GCTTCCGGGGTGCCTGATAGATTCTCCGGGTCCGGGAGCGGAACCGACTTTAC |
| | | CCTGAAAATCTCGAGGGTGGAGGCCGAGGACGTCGGAGTGTACTACTGCATGC |
| | | AGGCGCTCCAGACTCCCCTGACCTTCGGAGGAGGAACGAAGGTCGACATCAAG |
| | | ACCACTACCCCAGCACCGAGGCCACCCACCCCGGCTCCTACCATCGCCTCCCA |
| | | GCCTCTGTCCCTGCGTCCGGAGGCATGTAGACCCGCAGCTGGTGGGGCCGTGC |
| | | ATACCCGGGGTCTTGACTTCGCCTGCGATATCTACATTTGGGCCCCTCTGGCT |
| | | GGTACTTGCGGGGTCCTGCTGCTTTCACTCGTGATCACTCTTTACTGTAAGCG |
| | | CGGTCGGAAGAAGCTGCTGTACATCTTTAAGCAACCCTTCATGAGGCCTGTGC |
| | | AGACTACTCAAGAGGAGGACGGCTGTTCATGCCGGTTCCCAGAGGAGGAGGAA |
| | | GGCGGCTGCGAACTGCGCGTGAAATTCAGCCGCAGCGCAGATGCTCCAGCCTA |
| | | CAAGCAGGGGCAGAACCAGCTCTACAACGAACTCAATCTTGGTCGGAGAGAGG |
| | | AGTACGACGTGCTGGACAAGCGGAGAGGACGGGACCCAGAAATGGGCGGGAAG |
| | | CCGCGCAGAAAGAATCCCCAAGAGGGCCTGTACAACGAGCTCCAAAAGGATAA |
| | | GATGGCAGAAGCCTATAGCGAGATTGGTATGAAAGGGGAACGCAGAAGAGGCA |
| | | AAGGCCACGACGGACTGTACCAGGGACTCAGCACCGCCACCAAGGACACCTAT |
| | | GACGCTCTTCACATGCAGGCCCTGCCGCCTCGG |

BCMA_EBB-C1981-C3

| | | |
|---|---|---|
| BCMA_EBB- | 1171 | QVQLVESGGGLVQPGGSLRLSCAASGFTFSSYAMSWVRQAPGKGLEWVSAISG |
| C1981-C3- aa | | SGGSTYYADSVKGRFTISRDNSKNTLYLQMNSLRAEDTAVYYCAKVGYDSSGY |
| ScFv domain | | YRDYYGMDVWGQGTTVTVSSGGGGSGGGGSGGGGSEIVLTQSPGTLSLSPGER |
| | | ATLSCRASQSVSSSYLAWYQQKPGQAPRLLIYGTSSRATGISDRFSGSGSGTD |
| | | FTLTISRLEPEDFAVYYCQHYGNSPPKFTFGPGTKLEIK |
| BCMA_EBB- | 1172 | CAAGTGCAGCTCGTGGAGTCAGGCGGAGGACTGGTGCAGCCCGGGGGCTCCCT |
| C1981-C3- nt | | GAGACTTTCCTGCGCGGCATCGGGTTTTACCTTCTCCTCCTATGCTATGTCCT |
| ScFv domain | | GGGTGCGCCAGGCCCCGGGAAAGGGACTGGAATGGGTGTCCGCAATCAGCGGT |
| | | AGCGGGGGCTCAACATACTACGCCGACTCCGTCAAGGGTCGCTTCACTATTTC |
| | | CCGGGACAACTCCAAGAATACCCTGTACCTCCAAATGAACAGCCTCAGGGCCG |
| | | AGGATACTGCCGTGTACTACTGCGCCAAAGTCGGATACGATAGCTCCGGTTAC |
| | | TACCGGGACTACTACGGAATGGACGTGTGGGGACAGGGCACCACCGTGACCGT |
| | | GTCAAGCGGCGGAGGCGGTTCAGGAGGGGGAGGCTCCGGCGGTGGAGGGTCCG |
| | | AAATCGTCCTGACTCAGTCGCCTGGCACTCTGTCGTTGTCCCCGGGGGAGCGC |
| | | GCTACCCTGTCGTGTCGGGCGTCGCAGTCCGTGTCGAGCTCCTACCTCGCGTG |
| | | GTACCAGCAGAAGCCCGGACAGGCCCCTAGACTTCTGATCTACGGCACTTCTT |
| | | CACGCGCCACCGGGATCAGCGACAGGTTCAGCGGCTCCGGCTCCGGGACCGAC |
| | | TTCACCCTGACCATTAGCCGGCTGGAGCCTGAAGATTTCGCCGTGTATTACTG |
| | | CCAACACTACGGAAACTCGCCGCCAAAGTTCACGTTCGGACCCGGAACCAAGC |
| | | TGGAAATCAAG |
| BCMA_EBB- | 1173 | QVQLVESGGGLVQPGGSLRLSCAASGFTFSSYAMSWVRQAPGKGLEWVSAISG |
| C1981-C3- aa | | SGGSTYYADSVKGRFTISRDNSKNTLYLQMNSLRAEDTAVYYCAKVGYDSSGY |
| VH | | YRDYYGMDVWGQGTTVTVSS |
| BCMA_EBB- | 1174 | EIVLTQSPGTLSLSPGERATLSCRASQSVSSSYLAWYQQKPGQAPRLLIYGTS |
| C1981-C3- aa | | SRATGISDRFSGSGSGTDFTLTISRLEPEDFAVYYCQHYGNSPPKFTFGPGTK |
| VL | | LEIK |
| BCMA_EBB- | 1175 | MALPVTALLLPLALLLHAARPQVQLVESGGGLVQPGGSLRLSCAASGFTFSSY |
| C1981-C3- aa | | AMSWVRQAPGKGLEWVSAISGSGGSTYYADSVKGRFTISRDNSKNTLYLQMNS |
| Full CART | | LRAEDTAVYYCAKVGYDSSGYYRDYYGMDVWGQGTTVTVSSGGGGSGGGGSGG |
| | | GGSEIVLTQSPGTLSLSPGERATLSCRASQSVSSSYLAWYQQKPGQAPRLLIY |
| | | GTSSRATGISDRFSGSGSGTDFTLTISRLEPEDFAVYYCQHYGNSPPKFTFGP |
| | | GTKLEIKTTTPAPRPPTPAPTIASQPLSLRPEACRPAAGGAVHTRGLDFACDI |
| | | YIWAPLAGTCGVLLLSLVITLYCKRGRKKLLYIFKQPFMRPVQTTQEEDGCSC |
| | | RFPEEEEGGCELRVKFSRSADAPAYKQGQNQLYNELNLGRREEYDVLDKRRGR |
| | | DPEMGGKPRRKNPQEGLYNELQKDKMAEAYSEIGMKGERRRGKGHDGLYQGLS |
| | | TATKDTYDALHMQALPPR |
| BCMA_EBB- | 1176 | ATGGCCCTCCCTGTCACCGCCCTGCTGCTTCCGCTGGCTCTTCTGCTCCACGC |
| C1981-C3- nt | | CGCTCGGCCCCAAGTGCAGCTCGTGGAGTCAGGCGGAGGACTGGTGCAGCCCG |
| Full CART | | GGGGCTCCCTGAGACTTTCCTGCGCGGCATCGGGTTTTACCTTCTCCTCCTAT |
| | | GCTATGTCCTGGGTGCGCCAGGCCCCGGGAAAGGGACTGGAATGGGTGTCCGC |
| | | AATCAGCGGTAGCGGGGGCTCAACATACTACGCCGACTCCGTCAAGGGTCGCT |
| | | TCACTATTTCCCGGGACAACTCCAAGAATACCCTGTACCTCCAAATGAACAGC |
| | | CTCAGGGCCGAGGATACTGCCGTGTACTACTGCGCCAAAGTCGGATACGATAG |
| | | CTCCGGTTACTACCGGGACTACTACGGAATGGACGTGTGGGGACAGGGCACCA |
| | | CCGTGACCGTGTCAAGCGGCGGAGGCGGTTCAGGAGGGGGAGGCTCCGGCGGT |
| | | GGAGGGTCCGAAATCGTCCTGACTCAGTCGCCTGGCACTCTGTCGTTGTCCCC |
| | | GGGGGAGCGCGCTACCCTGTCGTGTCGGGCGTCGCAGTCCGTGTCGAGCTCCT |
| | | ACCTCGCGTGGTACCAGCAGAAGCCCGGACAGGCCCCTAGACTTCTGATCTAC |
| | | GGCACTTCTTCACGCGCCACCGGGATCAGCGACAGGTTCAGCGGCTCCGGCTC |
| | | CGGGACCGACTTCACCCTGACCATTAGCCGGCTGGAGCCTGAAGATTTCGCCG |
| | | TGTATTACTGCCAACACTACGGAAACTCGCCGCCAAAGTTCACGTTCGGACCC |
| | | GGAACCAAGCTGGAAATCAAGACCACTACCCCAGCACCGAGGCCACCCACCCC |
| | | GGCTCCTACCATCGCCTCCCAGCCTCTGTCCCTGCGTCCGGAGGCATGTAGAC |
| | | CCGCAGCTGGTGGGGCCGTGCATACCCGGGGTCTTGACTTCGCCTGCGATATC |
| | | TACATTTGGGCCCCTCTGGCTGGTACTTGCGGGGTCCTGCTGCTTTCACTCGT |
| | | GATCACTCTTTACTGTAAGCGCGGTCGGAAGAAGCTGCTGTACATCTTTAAGC |
| | | AACCCTTCATGAGGCCTGTGCAGACTACTCAAGAGGAGGACGGCTGTTCATGC |
| | | CGGTTCCCAGAGGAGGAGGAAGGCGGCTGCGAACTGCGCGTGAAATTCAGCCG |
| | | CAGCGCAGATGCTCCAGCCTACAAGCAGGGGCAGAACCAGCTCTACAACGAAC |
| | | TCAATCTTGGTCGGAGAGAGGAGTACGACGTGCTGGACAAGCGGAGAGGACGG |
| | | GACCCAGAAATGGGCGGGAAGCCGCGCAGAAAGAATCCCCAAGAGGGCCTGTA |
| | | CAACGAGCTCCAAAAGGATAAGATGGCAGAAGCCTATAGCGAGATTGGTATGA |
| | | AAGGGGAACGCAGAAGAGGCAAAGGCCACGACGGACTGTACCAGGGACTCAGC |
| | | ACCGCCACCAAGGACACCTATGACGCTCTTCACATGCAGGCCCTGCCGCCTCG |
| | | G |

BCMA_EBB-C1978-G4

| | | |
|---|---|---|
| BCMA_EBB- | 1177 | EVQLVESGGGLVQPGGSLRLSCAASGFTFSSYAMSWVRQAPGKGLEWVSAISG |
| C1978-G4- aa | | SGGSTYYADSVKGRFTISRDNSKNTLYLQMNSLRAEDTAVYYCAKMGWSSGYL |
| ScFv domain | | GAFDIWGQGTTVTVSSGGGGSGGGGSGGGGSEIVLTQSPGTLSLSPGERATLS |
| | | CRASQSVASSFLAWYQQKPGQAPRLLIYGASGRATGIPDRFSGSGSGTDFTLT |
| | | ISRLEPEDFAVYYCQHYGGSPRLTFGGGTKVDIK |
| BCMA_EBB- | 1178 | GAAGTCCAACTGGTGGAGTCCGGGGGAGGGCTCGTGCAGCCCGGAGGCAGCCT |
| C1978-G4- nt | | TCGGCTGTCGTGCGCCGCCTCCGGGTTCACGTTCTCATCCTACGCGATGTCGT |
| ScFv domain | | GGGTCAGACAGGCACCAGGAAAGGGACTGGAATGGGTGTCCGCCATTAGCGGC |
| | | TCCGGCGGTAGCACCTACTATGCCGACTCAGTGAAGGGAAGGTTCACTATCTC |
| | | CCGCGACAACAGCAAGAACACCCTGTACCTCCAAATGAACTCTCTGCGGGCCG |
| | | AGGATACCGCGGTGTACTATTGCGCCAAGATGGGTTGGTCCAGCGGATACTTG |
| | | GGAGCCTTCGACATTTGGGGACAGGGCACTACTGTGACCGTGTCCTCCGGGGG |
| | | TGGCGGATCGGGAGGCGGCGGCTCGGGTGGAGGGGGTTCCGAAATCGTGTTGA |
| | | CCCAGTCACCGGGAACCCTCTCGCTGTCCCCGGGAGAACGGGCTACACTGTCA |
| | | TGTAGAGCGTCCCAGTCCGTGGCTTCCTCGTTCCTGGCCTGGTACCAGCAGAA |
| | | GCCGGGACAGGCACCCCGCCTGCTCATCTACGGAGCCAGCGGCCGGGCGACCG |
| | | GCATCCCTGACCGCTTCTCCGGTTCCGGCTCGGGCACCGACTTTACTCTGACC |
| | | ATTAGCAGGCTTGAGCCCGAGGATTTTGCCGTGTACTACTGCCAACACTACGG |
| | | GGGGAGCCCTCGCCTGACCTTCGGAGGCGGAACTAAGGTCGATATCAAAA |
| BCMA_EBB- | 1179 | EVQLVESGGGLVQPGGSLRLSCAASGFTFSSYAMSWVRQAPGKGLEWVSAISG |
| C1978-G4- aa | | SGGSTYYADSVKGRFTISRDNSKNTLYLQMNSLRAEDTAVYYCAKMGWSSGYL |
| VH | | GAFDIWGQGTTVTVSS |
| BCMA_EBB- | 1180 | EIVLTQSPGTLSLSPGERATLSCRASQSVASSFLAWYQQKPGQAPRLLIYGAS |
| C1978-G4- aa | | GRATGIPDRFSGSGSGTDFTLTISRLEPEDFAVYYCQHYGGSPRLTFGGGTKV |
| VL | | DIK |
| BCMA_EBB- | 1181 | MALPVTALLLPLALLLHAARPEVQLVESGGGLVQPGGSLRLSCAASGFTFSSY |
| C1978-G4- aa | | AMSWVRQAPGKGLEWVSAISGSGGSTYYADSVKGRFTISRDNSKNTLYLQMNS |
| Full CART | | LRAEDTAVYYCAKMGWSSGYLGAFDIWGQGTTVTVSSGGGGSGGGGSGGGGSE |
| | | IVLTQSPGTLSLSPGERATLSCRASQSVASSFLAWYQQKPGQAPRLLIYGASG |
| | | RATGIPDRFSGSGSGTDFTLTISRLEPEDFAVYYCQHYGGSPRLTFGGGTKVD |
| | | IKTTTPAPRPPTPAPTIASQPLSLRPEACRPAAGGAVHTRGLDFACDIYIWAP |
| | | LAGTCGVLLLSLVITLYCKRGRKKLLYIFKQPFMRPVQTTQEEDGCSCRFPEE |
| | | EEGGCELRVKFSRSADAPAYKQGQNQLYNELNLGRREEYDVLDKRRGRDPEMG |
| | | GKPRRKNPQEGLYNELQKDKMAEAYSEIGMKGERRRGKGHDGLYQGLSTATKD |
| | | TYDALHMQALPPR |
| BCMA_EBB- | 1182 | ATGGCCCTCCCTGTCACCGCCCTGCTGCTTCCGCTGGCTCTTCTGCTCCACGC |
| C1978-G4- nt | | CGCTCGGCCCGAAGTCCAACTGGTGGAGTCCGGGGGAGGGCTCGTGCAGCCCG |
| Full CART | | GAGGCAGCCTTCGGCTGTCGTGCGCCGCCTCCGGGTTCACGTTCTCATCCTAC |
| | | GCGATGTCGTGGGTCAGACAGGCACCAGGAAAGGGACTGGAATGGGTGTCCGC |
| | | CATTAGCGGCTCCGGCGGTAGCACCTACTATGCCGACTCAGTGAAGGGAAGGT |
| | | TCACTATCTCCCGCGACAACAGCAAGAACACCCTGTACCTCCAAATGAACTCT |
| | | CTGCGGGCCGAGGATACCGCGGTGTACTATTGCGCCAAGATGGGTTGGTCCAG |
| | | CGGATACTTGGGAGCCTTCGACATTTGGGGACAGGGCACTACTGTGACCGTGT |
| | | CCTCCGGGGGTGGCGGATCGGGAGGCGGCGGCTCGGGTGGAGGGGGTTCCGAA |
| | | ATCGTGTTGACCCAGTCACCGGGAACCCTCTCGCTGTCCCCGGGAGAACGGGC |
| | | TACACTGTCATGTAGAGCGTCCCAGTCCGTGGCTTCCTCGTTCCTGGCCTGGT |
| | | ACCAGCAGAAGCCGGGACAGGCACCCCGCCTGCTCATCTACGGAGCCAGCGGC |
| | | CGGGCGACCGGCATCCCTGACCGCTTCTCCGGTTCCGGCTCGGGCACCGACTT |
| | | TACTCTGACCATTAGCAGGCTTGAGCCCGAGGATTTTGCCGTGTACTACTGCC |
| | | AACACTACGGGGGGAGCCCTCGCCTGACCTTCGGAGGCGGAACTAAGGTCGAT |
| | | ATCAAAACCACTACCCCAGCACCGAGGCCACCCACCCCGGCTCCTACCATCGC |
| | | CTCCCAGCCTCTGTCCCTGCGTCCGGAGGCATGTAGACCCGCAGCTGGTGGGG |
| | | CCGTGCATACCCGGGGTCTTGACTTCGCCTGCGATATCTACATTTGGGCCCCT |
| | | CTGGCTGGTACTTGCGGGGTCCTGCTGCTTTCACTCGTGATCACTCTTTACTG |
| | | TAAGCGCGGTCGGAAGAAGCTGCTGTACATCTTTAAGCAACCCTTCATGAGGC |
| | | CTGTGCAGACTACTCAAGAGGAGGACGGCTGTTCATGCCGGTTCCCAGAGGAG |
| | | GAGGAAGGCGGCTGCGAACTGCGCGTGAAATTCAGCCGCAGCGCAGATGCTCC |
| | | AGCCTACAAGCAGGGGCAGAACCAGCTCTACAACGAACTCAATCTTGGTCGGA |
| | | GAGAGGAGTACGACGTGCTGGACAAGCGGAGAGGACGGGACCCAGAAATGGGC |
| | | GGGAAGCCGCGCAGAAAGAATCCCCAAGAGGGCCTGTACAACGAGCTCCAAAA |
| | | GGATAAGATGGCAGAAGCCTATAGCGAGATTGGTATGAAAGGGGAACGCAGAA |
| | | GAGGCAAAGGCCACGACGGACTGTACCAGGGACTCAGCACCGCCACCAAGGAC |
| | | ACCTATGACGCTCTTCACATGCAGGCCCTGCCGCCTCGG |

TABLE 6
Additional exemplary BCMA CAR sequences

| | | SEQ |
|---|---|---|
| | | ID |
| Name | Sequence | NO: |
| A7D12.2 | QIQLVQSGPDLKKPGETVKLSCKASGYTFTNFGMNWVKQAPGKGFKWMAWINTYTGE | 1183 |
| VH | SYFADDFKGRFAFSVETSATTAYLQINNLKTEDTATYFCARGEIYYGYDGGFAYWGQ | |
| | GTLVTVSA | |
| A7D12.2 | DVVMTQSHRFMSTSVGDRVSITCRASQDVNTAVSWYQQKPGQSPKLLIFSASYRYTG | 1184 |
| VL | VPDRFTGSGSGADFTLTISSVQAEDLAVYYCQQHYSTPWTFGGGTKLDIK | |
| A7D12.2 | QIQLVQSGPDLKKPGETVKLSCKASGYTFTNFGMNWVKQAPGKGFKWMAWINTYTGE | 1185 |
| scFv | SYFADDFKGRFAFSVETSATTAYLQINNLKTEDTATYFCARGEIYYGYDGGFAYWGQ | |
| domain | GTLVTVSAGGGGSGGGGSGGGGSDVVMTQSHRFMSTSVGDRVSITCRASQDVNTAVS | |
| | WYQQKPGQSPKLLIFSASYRYTGVPDRFTGSGSGADFTLTISSVQAEDLAVYYCQQH | |
| | YSTPWTFGGGTKLDIK | |
| A7D12.2 | QIQLVQSGPDLKKPGETVKLSCKASGYTFTNFGMNWVKQAPGKGFKWMAWINTYTGE | 1186 |
| Full | SYFADDFKGRFAFSVETSATTAYLQINNLKTEDTATYFCARGEIYYGYDGGFAYWGQ | |
| CART | GTLVTVSAGGGGSGGGGSGGGGSDVVMTQSHRFMSTSVGDRVSITCRASQDVNTAVS | |
| | WYQQKPGQSPKLLIFSASYRYTGVPDRFTGSGSGADFTLTISSVQAEDLAVYYCQQH | |
| | YSTPWTFGGGTKLDIKTTTPAPRPPTPAPTIASQPLSLRPEACRPAAGGAVHTRGLD | |
| | FACDIYIWAPLAGTCGVLLLSLVITLYCKRGRKKLLYIFKQPFMRPVQTTQEEDGCS | |
| | CRFPEEEEGGCELRVKFSRSADAPAYKQGQNQLYNELNLGRREEYDVLDKRRGRDPE | |
| | MGGKPRRKNPQEGLYNELQKDKMAEAYSEIGMKGERRRGKGHDGLYQGLSTATKDTY | |
| | DALHMQALPPR | |
| C11D5.3 | QIQLVQSGPELKKPGETVKISCKASGYTFTDYSINWVKRAPGKGLKWMGWINTETRE | 1187 |
| VH | PAYAYDFRGRFAFSLETSASTAYLQINNLKYEDTATYFCALDYSYAMDYWGQGTSVT | |
| | VSS | |
| C11D5.3 | DIVLTQSPASLAMSLGKRATISCRASESVSVIGAHLIHWYQQKPGQPPKLLIYLASN | 1188 |
| VL | LETGVPARFSGSGSGTDFTLTIDPVEEDDVAIYSCLQSRIFPRTFGGGTKLEIK | |
| C11D5.3 | QIQLVQSGPELKKPGETVKISCKASGYTFTDYSINWVKRAPGKGLKWMGWINTETRE | 1189 |
| scFv | PAYAYDFRGRFAFSLETSASTAYLQINNLKYEDTATYFCALDYSYAMDYWGQGTSVT | |
| domain | VSSGGGGSGGGGSGGGGSQIQLVQSGPELKKPGETVKISCKASGYTFTDYSINWVKR | |
| | APGKGLKWMGWINTETREPAYAYDFRGRFAFSLETSASTAYLQINNLKYEDTATYFC | |
| | ALDYSYAMDYWGQGTSVTVSS | |
| C11D5.3 | QIQLVQSGPELKKPGETVKISCKASGYTFTDYSINWVKRAPGKGLKWMGWINTETRE | 1190 |
| Full | PAYAYDFRGRFAFSLETSASTAYLQINNLKYEDTATYFCALDYSYAMDYWGQGTSVT | |
| CART | VSSGGGGSGGGGSGGGGSQIQLVQSGPELKKPGETVKISCKASGYTFTDYSINWVKR | |
| | APGKGLKWMGWINTETREPAYAYDFRGRFAFSLETSASTAYLQINNLKYEDTATYFC | |
| | ALDYSYAMDYWGQGTSVTVSSTTTPAPRPPTPAPTIASQPLSLRPEACRPAAGGAVH | |
| | TRGLDFACDIYIWAPLAGTCGVLLLSLVITLYCKRGRKKLLYIFKQPFMRPVQTTQE | |
| | EDGCSCRFPEEEEGGCELRVKFSRSADAPAYKQGQNQLYNELNLGRREEYDVLDKRR | |
| | GRDPEMGGKPRRKNPQEGLYNELQKDKMAEAYSEIGMKGERRRGKGHDGLYQGLSTA | |
| | TKDTYDALHMQALPPR | |
| C12A3.2 | QIQLVQSGPELKKPGETVKISCKASGYTFRHYSMNWVKQAPGKGLKWMGRINTESGV | 1191 |
| VH | PIYADDFKGRFAFSVETSASTAYLVINNLKDEDTASYFCSNDYLYSLDFWGQGTALT | |
| | VSS | |
| C12A3.2 | DIVLTQSPPSLAMSLGKRATISCRASESVTILGSHLIYWYQQKPGQPPTLLIQLASN | 1192 |
| VL | VQTGVPARFSGSGSRTDFTLTIDPVEEDDVAVYYCLQSRTIPRTFGGGTKLEIK | |
| C12A3.2 | QIQLVQSGPELKKPGETVKISCKASGYTFRHYSMNWVKQAPGKGLKWMGRINTESGV | 1193 |
| scFv | PIYADDFKGRFAFSVETSASTAYLVINNLKDEDTASYFCSNDYLYSLDFWGQGTALT | |
| domain | VSSGGGGSGGGGSGGGGSDIVLTQSPPSLAMSLGKRATISCRASESVTILGSHLIYW | |
| | YQQKPGQPPTLLIQLASNVQTGVPARFSGSGSRTDFTLTIDPVEEDDVAVYYCLQSR | |
| | TIPRTFGGGTKLEIK | |
| C12A3.2 | QIQLVQSGPELKKPGETVKISCKASGYTFRHYSMNWVKQAPGKGLKWMGRINTESGV | 1194 |
| Full | PIYADDFKGRFAFSVETSASTAYLVINNLKDEDTASYFCSNDYLYSLDFWGQGTALT | |
| CART | VSSGGGGSGGGGSGGGGSDIVLTQSPPSLAMSLGKRATISCRASESVTILGSHLIYW | |
| | YQQKPGQPPTLLIQLASNVQTGVPARFSGSGSRTDFTLTIDPVEEDDVAVYYCLQSR | |
| | TIPRTFGGGTKLEIKTTTPAPRPPTPAPTIASQPLSLRPEACRPAAGGAVHTRGLDF | |
| | ACDIYIWAPLAGTCGVLLLSLVITLYCKRGRKKLLYIFKQPFMRPVQTTQEEDGCSC | |
| | RFPEEEEGGCELRVKFSRSADAPAYKQGQNQLYNELNLGRREEYDVLDKRRGRDPEM | |
| | GGKPRRKNPQEGLYNELQKDKMAEAYSEIGMKGERRRGKGHDGLYQGLSTATKDTYD | |
| | ALHMQALPPR | |
| C13F12.1 | QIQLVQSGPELKKPGETVKISCKASGYTFTHYSMNWVKQAPGKGLKWMGRINTETGE | 1195 |
| VH | PLYADDFKGRFAFSLETSASTAYLVINNLKNEDTATFFCSNDYLYSCDYWGQGTTLT | |
| | VSS | |
| C13F12.1 | DIVLTQSPPSLAMSLGKRATISCRASESVTILGSHLIYWYQQKPGQPPTLLIQLASN | 1196 |
| VL | VQTGVPARFSGSGSRTDFTLTIDPVEEDDVAVYYCLQSRTIPRTFGGGTKLEIK | |
| C13F12.1 | QIQLVQSGPELKKPGETVKISCKASGYTFTHYSMNWVKQAPGKGLKWMGRINTETGE | 1197 |
| scFv | PLYADDFKGRFAFSLETSASTAYLVINNLKNEDTATFFCSNDYLYSCDYWGQGTTLT | |
| domain | VSSGGGGSGGGGSGGGGSDIVLTQSPPSLAMSLGKRATISCRASESVTILGSHLIYW | |
| | YQQKPGQPPTLLIQLASNVQTGVPARFSGSGSRTDFTLTIDPVEEDDVAVYYCLQSR | |
| | TIPRTFGGGTKLEIK | |
| C13F12.1 | QIQLVQSGPELKKPGETVKISCKASGYTFTHYSMNWVKQAPGKGLKWMGRINTETGE | 1198 |
| Full | PLYADDFKGRFAFSLETSASTAYLVINNLKNEDTATFFCSNDYLYSCDYWGQGTTLT | |
| CART | VSSGGGGSGGGGSGGGGSDIVLTQSPPSLAMSLGKRATISCRASESVTILGSHLIYW | |
| | YQQKPGQPPTLLIQLASNVQTGVPARFSGSGSRTDFTLTIDPVEEDDVAVYYCLQSR | |
| | TIPRTFGGGTKLEIKTTTPAPRPPTPAPTIASQPLSLRPEACRPAAGGAVHTRGLDF | |
| | ACDIYIWAPLAGTCGVLLLSLVITLYCKRGRKKLLYIFKQPFMRPVQTTQEEDGCSC | |
| | RFPEEEEGGCELRVKFSRSADAPAYKQGQNQLYNELNLGRREEYDVLDKRRGRDPEM | |
| | GGKPRRKNPQEGLYNELQKDKMAEAYSEIGMKGERRRGKGHDGLYQGLSTATKDTYD | |
| | ALHMQALPPR | |

[0700] Exemplary BCMA CAR constructs disclose herein comprise an scFv (e.g., a scFv as disclosed in Table 5 or 6, optionally preceded with an optional leader sequence (e.g., SEQ ID NO: 2 and SEQ ID NO: 3 or 1938 for exemplary leader amino acid and nucleotide sequences, respectively). The sequences of the scFv fragments (e.g., an ScFv from any of SEQ ID NOs: 967-1182, e.g., SEQ ID NOs: 967, 973, 979, 985, 991, 997, 1003, 1009, 1015, 1021, 1027, 1033, 1039, 1045, 1051, 1057, 1063, 1069, 1075, 1081, 1087, 1093, 1099, 1105, 1111, 1117, 1123, 1129, 1135, 1141, 1147, 1153, 1159, 1165, 1171, 1177, not including the optional leader sequence) are provided herein in Tables 5 or 6. The BCMA CAR construct can further include an optional hinge domain, e.g., a CD8 hinge domain (e.g., including the amino acid sequence of SEQ ID NO: 403 or encoded by a nucleic acid sequence of SEQ ID NO: 404); a transmembrane domain, e.g., a CD8 transmembrane domain (e.g., including the amino acid sequence of SEQ ID NO: 12 or encoded by the nucleotide sequence of SEQ ID NO: 13 or 1939); an intracellular domain, e.g., a 4-1BB intracellular domain (e.g., including the amino acid sequence of SEQ ID NO: 14 or encoded by the nucleotide sequence of SEQ ID NO: 15 or 1940; and a functional signaling domain, e.g., a CD3 zeta domain (e.g., including amino acid sequence of SEQ ID NO: 18 or 20, or encoded by the nucleotide sequence of SEQ ID NO: 19, 1941, or 21). In certain embodiments, the domains are contiguous with and in the same reading frame to form a single fusion protein. In other embodiments, the domain are in separate polypeptides, e.g., as in an RCAR molecule as described herein.

[0701] In certain embodiments, the full length BCMA CAR molecule includes the amino acid sequence of, or is encoded by the nucleotide sequence of, BCMA-1, BCMA-2, BCMA-3, BCMA-4, BCMA-5, BCMA-6, BCMA-7, BCMA-8, BCMA-9, BCMA-10, BCMA-11, BCMA-12, BCMA-13, BCMA-14, BCMA-15, 149362, 149363, 149364, 149365, 149366, 149367, 149368, 149369, BCMA_EBB-C1978-A4, BCMA_EBB-C1978-G1, BCMA_EBB-C1979-C1, BCMA_EBB-C1978-C7, BCMA_EBB-C1978-D10, BCMA_EBB-C1979-C12, BCMA_EBB-C1980-G4, BCMA_EBB-C1980-D2, BCMA_EBB-C1978-A10, BCMA_EBB-C1978-D4, BCMA_EBB-C1980-A2, BCMA_EBB-C1981-C3, BCMA_EBB-C1978-G4, A7D12.2, C11D5.3, C12A3.2, or C13F12.1 provided in Table 5 or 6, or a sequence substantially (e.g., 85%, 95-99% or higher) identical thereto.

[0702] In certain embodiments, the BCMA CAR molecule, or the anti-BCMA antigen binding domain, includes the scFv amino acid sequence of BCMA-1, BCMA-2, BCMA-3, BCMA-4, BCMA-5, BCMA-6, BCMA-7, BCMA-8, BCMA-9, BCMA-10, BCMA-11, BCMA-12, BCMA-13, BCMA-14, BCMA-15, 149362, 149363, 149364, 149365, 149366, 149367, 149368, 149369, BCMA_EBB-C1978-A4, BCMA_EBB-C1978-G1, BCMA_EBB-C1979-C1, BCMA_EBB-C1978-C7, BCMA_EBB-C1978-D10, BCMA_EBB-C1979-C12, BCMA_EBB-C1980-G4, BCMA_EBB-C1980-D2, BCMA_EBB-C1978-A10, BCMA_EBB-C1978-D4, BCMA_EBB-C1980-A2, BCMA_EBB-C1981-C3, BCMA_EBB-C1978-G4, A7D12.2, C11D5.3, C12A3.2, or C13F12.1 provided in Table 5 or 6 (with or without the leader sequence), or a sequence substantially identical (e.g., 85%, 95-99% or higher identical, or up to 20, 15, 10, 8, 6, 5, 4, 3, 2, or 1 amino acid changes, e.g., substitutions (e.g., conservative substitutions)) to any of the aforesaid sequences.

[0703] In certain embodiments, the BCMA CAR molecule, or the anti-BCMA antigen binding domain, includes the heavy chain variable region and/or the light chain variable region of BCMA-1, BCMA-2, BCMA-3, BCMA-4, BCMA-5, BCMA-6, BCMA-7, BCMA-8, BCMA-9, BCMA-10, BCMA-11, BCMA-12, BCMA-13, BCMA-14, BCMA-15, 149362, 149363, 149364, 149365, 149366, 149367, 149368, 149369, BCMA_EBB-C1978-A4, BCMA_EBB-C1978-G1, BCMA_EBB-C1979-C1, BCMA_EBB-C1978-C7, BCMA_EBB-C1978-D10, BCMA_EBB-C1979-C12, BCMA_EBB-C1980-G4, BCMA_EBB-C1980-D2, BCMA_EBB-C1978-A10, BCMA_EBB-C1978-D4, BCMA_EBB-C1980-A2, BCMA_EBB-C1981-C3, BCMA_EBB-C1978-G4, A7D12.2, C11D5.3, C12A3.2, or C13F12.1 provided in Table 5 or 6, or a sequence substantially identical (e.g., 85%, 95-99% or higher identical, or up to 20, 15, 10, 8, 6, 5, 4, 3, 2, or 1 amino acid changes, e.g., substitutions (e.g., conservative substitutions)) to any of the aforesaid sequences.

[0704] In certain embodiments, the BCMA CAR molecule, or the anti-BCMA antigen binding domain, includes one, two or three CDRs from the heavy chain variable region (e.g., HCDR1, HCDR2 and/or HCDR3), provided in Table 7; and/or one, two or three CDRs from the light chain variable region (e.g., LCDR1, LCDR2 and/or LCDR3) of BCMA-1, BCMA-2, BCMA-3, BCMA-4, BCMA-5, BCMA-6, BCMA-7, BCMA-8, BCMA-9, BCMA-10, BCMA-11, BCMA-12, BCMA-13, BCMA-14, BCMA-15, 149362, 149363, 149364, 149365, 149366, 149367, 149368, 149369, BCMA_EBB-C1978-A4, BCMA_EBB-C1978-G1, BCMA_EBB-C1979-C1, BCMA_EBB-C1978-C7, BCMA_EBB-C1978-D10, BCMA_EBB-C1979-C12, BCMA_EBB-C1980-G4, BCMA_EBB-C1980-D2, BCMA_EBB-C1978-A10, BCMA_EBB-C1978-D4, BCMA_EBB-C1980-A2, BCMA_EBB-C1981-C3, BCMA_EBB-C1978-G4, A7D12.2, C11D5.3, C12A3.2, or C13F12.1, provided in Table 8; or a sequence substantially identical (e.g., 85%, 95-99% or higher identical, or up to 20, 15, 10, 8, 6, 5, 4, 3, 2, or 1 amino acid changes, e.g., substitutions (e.g., conservative substitutions)) to any of the aforesaid sequences.

[0705] In certain embodiments, the BCMA CAR molecule, or the anti-BCMA antigen binding domain, includes one, two or three CDRs from the heavy chain variable region (e.g., HCDR1, HCDR2 and/or HCDR3), provided in Table 9; and/or one, two or three CDRs from the light chain variable region (e.g., LCDR1, LCDR2 and/or LCDR3) of BCMA-1, BCMA-2, BCMA-3, BCMA-4, BCMA-5, BCMA-6, BCMA-7, BCMA-8, BCMA-9, BCMA-10, BCMA-11, BCMA-12, BCMA-13, BCMA-14, BCMA-15, 149362, 149363, 149364, 149365, 149366, 149367, 149368, 149369, BCMA_EBB-C1978-A4, BCMA_EBB-C1978-G1, BCMA_EBB-C1979-C1, BCMA_EBB-C1978-C7, BCMA_EBB-C1978-D10, BCMA_EBB-C1979-C12, BCMA_EBB-C1980-G4, BCMA_EBB-C1980-D2, BCMA_EBB-C1978-A10, BCMA_EBB-C1978-D4, BCMA_EBB-C1980-A2, BCMA_EBB-C1981-C3, BCMA_EBB-C1978-G4, A7D12.2, C11D5.3, C12A3.2, or C13F12.1, provided in Table 10; or a sequence substantially identical (e.g., 85%, 95-99% or higher identical, or up to 20, 15, 10, 8, 6, 5, 4, 3, 2, or 1 amino acid changes, e.g., substitutions (e.g., conservative substitutions)) to any of the aforesaid sequences.

[0706] In certain embodiments, the BCMA CAR molecule, or the anti-BCMA antigen binding domain, includes one, two or three CDRs from the heavy chain variable region (e.g., HCDR1, HCDR2 and/or HCDR3), provided in Table 11; and/or one, two or three CDRs from the light chain variable region (e.g., LCDR1, LCDR2 and/or LCDR3) of BCMA-1, BCMA-2, BCMA-3, BCMA-4, BCMA-5, BCMA-6, BCMA-7, BCMA-8, BCMA-9, BCMA-10, BCMA-11, BCMA-12, BCMA-13, BCMA-14, BCMA-15, 149362, 149363, 149364, 149365, 149366, 149367, 149368, 149369, BCMA_EBB-C1978-A4, BCMA_EBB-C1978-G1, BCMA_EBB-C1979-C1, BCMA_EBB-C1978-C7, BCMA_EBB-C1978-D10, BCMA_EBB-C1979-C12, BCMA_EBB-C1980-G4, BCMA_EBB-C1980-D2, BCMA_EBB-C1978-A10, BCMA_EBB-C1978-D4, BCMA_EBB-C1980-A2, BCMA_EBB-C1981-C3, BCMA_EBB-C1978-G4, A7D12.2, C11D5.3, C12A3.2, or C13F12.1, provided in Table 12; or a sequence substantially identical (e.g., 85%, 95-99% or higher identical, or up to 20, 15, 10, 8, 6, 5, 4, 3, 2, or 1 amino acid changes, e.g., substitutions (e.g., conservative substitutions)) to any of the aforesaid sequences.

[0707] The sequences of human CDR sequences of the scFv domains are shown in Tables 7, 9, and 11 for the heavy chain variable domains and in Tables 8, 10, and 12 for the light chain variable domains. “ID” stands for the respective SEQ ID NO for each CDR.

TABLE 7
Heavy Chain Variable Domain CDRs according to the
Kabat numbering scheme (Rabat et al. (1991),
“Sequences of Proteins of Immunological Interest,”
5th Ed. Public Health Service, National Institutes of
Health, Bethesda, MD)

| Candidate | HCDR1 | ID | HCDR2 | ID | HCDR3 | ID |
|---|---|---|---|---|---|---|
| 139109 | NHGMS | 1199 | GIVYSGSTYYAASVKG | 1239 | HGGESDV | 1279 |
| 139103 | NYAMS | 1200 | GISRSGENTYYADSVKG | 1240 | SPAHYYGGMDV | 1280 |
| 139105 | DYAMH | 1201 | GISWNSGSIGYADSVKG | 1241 | HSFLAY | 1281 |
| 139111 | NHGMS | 1202 | GIVYSGSTYYAASVKG | 1242 | HGGESDV | 1282 |
| 139100 | NFGIN | 1203 | WINPKNNNTNYAQKFQG | 1243 | GPYYYQSYMDV | 1283 |
| 139101 | SDAMT | 1204 | VISGSGGTTYYADSVKG | 1244 | LDSSGYYYARGPR | 1284 |
| | | | | | Y | |
| 139102 | NYGIT | 1205 | WISAYNGNTNYAQKFOG | 1245 | GPYYYYMDV | 1285 |
| 139104 | NHGMS | 1206 | GIVYSGSTYYAASVKG | 1246 | HGGESDV | 1286 |
| 139106 | NHGMS | 1207 | GIVYSGSTYYAASVKG | 1247 | HGGESDV | 1287 |
| 139107 | NHGMS | 1208 | GIVYSGSTYYAASVKG | 1248 | HGGESDV | 1288 |
| 139108 | DYYMS | 1209 | YISSSGSTIYYADSVKG | 1249 | ESGDGMDV | 1289 |
| 139110 | DYYMS | 1210 | YISSSGNTIYYADSVKG | 1250 | STMVREDY | 1290 |
| 139112 | NHGMS | 1211 | GIVYSGSTYYAASVKG | 1251 | HGGESDV | 1291 |
| 139113 | NHGMS | 1212 | GIVYSGSTYYAASVKG | 1252 | HGGESDV | 1292 |
| 139114 | NHGMS | 1213 | GIVYSGSTYYAASVKG | 1253 | HGGESDV | 1293 |
| 149362 | SSYYYWG | 1214 | SIYYSGSAYYNPSLKS | 1254 | HWQEWPDAFDI | 1294 |
| 149363 | TSGMCVS | 1215 | RIDWDEDKEYSTSLKT | 1255 | SGAGGTSATAFDI | 1295 |
| 149364 | SYSMN | 1216 | SISSSSSYIYYADSVKG | 1256 | TIAAVYAFDI | 1296 |
| 149365 | DYYMS | 1217 | YISSSGSTIYYADSVKG | 1257 | DLRGAFDI | 1297 |
| 149366 | SHYIH | 1218 | MINPSGGVTAYSQTLQG | 1258 | EGSGSGWYFDF | 1298 |
| 149367 | SGGYYWS | 1219 | YIYYSGSTYYNPSLKS | 1259 | AGIAARLRGAFDI | 1299 |
| 149368 | SYAIS | 1220 | GIIPIFGTANYAQKFQG | 1260 | RGGYQLLRWDVGL | 1300 |
| | | | | | LRSAFDI | |
| 149369 | SNSAAWN | 1221 | RTYYRSKWYSFYAISLK | 1261 | SSPEGLFLYWFDP | 1301 |
| | | | S | | | |
| BCMA_EBB- | SYAMS | 1222 | AISGSGGSTYYADSVKG | 1262 | VEGSGSLDY | 1302 |
| C1978-A4 | | | | | | |
| BCMA_EBB- | RYFMS | 1223 | GISDSGVSTYYADSAKG | 1263 | RAGSEASDl | 1303 |
| C1978-G1 | | | | | | |
| BCMA_EBB- | SYAMS | 1224 | AISGSGGSTYYADSVKG | 1264 | ATYKRELRYYYGM | 1304 |
| C1979-C1 | | | | | DV | |
| BCMA_EBB- | SYAMS | 1225 | AISGSGGSTYYADSVKG | 1265 | ATYKRELRYYYGM | 1305 |
| C1978-C7 | | | | | DV | |
| BCMA_EBB- | DYAMH | 1226 | GISWNSGSIGYADSVKG | 1266 | VGKAVPDV | 1306 |
| C1978-D10 | | | | | | |
| BCMA_EBB- | DYAMH | 1227 | SINWKGNSLAYGDSVKG | 1267 | HQGVAYYNYAMDV | 1307 |
| C1979-C12 | | | | | | |
| BCMA_EBB- | SYAMS | 1228 | AISGSGGSTYYADSVKG | 1268 | VVRDGMDV | 1308 |
| C1980-G4 | | | | | | |
| BCMA_EBB- | SYAMS | 1229 | AISGSGGSTYYADSVKG | 1269 | IPQTGTFDY | 1309 |
| C1980-D2 | | | | | | |
| BCMA_EBB- | SYAMS | 1230 | AISGSGGSTYYADSVKG | 1270 | ANYKRELRYYYGM | 1310 |
| C1978-A10 | | | | | DV | |
| BCMA_EBB- | SYAMS | 1231 | AISGSGGSTYYADSVKG | 1271 | ALVGATGAFDI | 1311 |
| C1978-D4 | | | | | | |
| BCMA_EBB- | SYAMS | 1232 | AISGSGGSTYYADSVKG | 1272 | WFGEGFDP | 1312 |
| C1980-A2 | | | | | | |
| BCMA_EBB- | SYAMS | 1233 | AISGSGGSTYYADSVKG | 1273 | VGYDSSGYYRDYY | 1313 |
| C1981-C3 | | | | | GMDV | |
| BCMA_EBB- | SYAMS | 1234 | AISGSGGSTYYADSVKG | 1274 | MGWSSGYLGAFDI | 1314 |
| C1978-G4 | | | | | | |
| A7D12.2 | NFGMN | 1235 | WINTYTGESYFADDFKG | 1275 | GEIYYGYDGGFAY | 1315 |
| C11D5.3 | DYSIN | 1236 | WINTETREPAYAYDFRG | 1276 | DYSYAMDY | 1316 |
| C12A3.2 | HYSMN | 1237 | RINTESGVPIYADDFKG | 1277 | DYLYSLDF | 1317 |
| C13F12.1 | HYSMN | 1238 | RINTETGEPLYADDFKG | 1278 | DYLYSCDY | 1318 |

TABLE 8
Light Chain Variable Domain CDRs according to the
Kabat numbering scheme (Kabat et al. (1991),
“Sequences of Proteins of Immunological Interest,”
5th Ed. Public Health Service, National Institutes
of Health, Bethesda, MD)

| Candidate | LCDR1 | ID | LCDR2 | ID | LCDR3 | ID |
|---|---|---|---|---|---|---|
| 139109 | RASQSISSYLN | 1319 | AASSLQS | 1359 | QQSYSTPYT | 1399 |
| 139103 | RASQSISSSFLA | 1320 | GASRRAT | 1360 | QQYHSSPSWT | 1400 |
| 139105 | RSSQSLLHSNGYNYLD | 1321 | LGSNRAS | 1361 | MQALQTPYT | 1401 |
| 139111 | KSSQSLLRNDGKTPLY | 1322 | EVSNRFS | 1362 | MQNIQFPS | 1402 |
| 139100 | RSSQSLLHSNGYNYLN | 1323 | LGSKRAS | 1363 | MQALQTPYT | 1403 |
| 139101 | RASQSISSYLN | 1324 | GASTLAS | 1364 | QQSYKRAS | 1404 |
| 139102 | RSSQSLLYSNGYNYVD | 1325 | LGSNRAS | 1365 | MQGRQFPYS | 1405 |
| 139104 | RASQSVSSNLA | 1326 | GASTRAS | 1366 | QQYGSSLT | 1406 |
| 139106 | RASQSVSSKLA | 1327 | GASIRAT | 1367 | QQYGSSSWT | 1407 |
| 139107 | RASQSVGSTNLA | 1328 | DASNRAT | 1368 | QQYGSSPPWT | 1408 |
| 139108 | RASQSISSYLN | 1329 | AASSLQS | 1369 | QQSYTLA | 1409 |
| 139110 | KSSESLVHNSGKTYLN | 1330 | EVSNRDS | 1370 | MQGTHWPGT | 1410 |
| 139112 | QASEDINKFLN | 1331 | DASTLQT | 1371 | QQYESLPLT | 1411 |
| 139113 | RASQSVGSNLA | 1332 | GASTRAT | 1372 | QQYNDWLPVT | 1412 |
| 139114 | RASQSIGSSSLA | 1333 | GASSRAS | 1373 | QQYAGSPPFT | 1413 |
| 149362 | KASQDIDDAMN | 1334 | SATSPVP | 1374 | LQHDNFPLT | 1414 |
| 149363 | RASQDIYNNLA | 1335 | AANKSQS | 1375 | QHYYRFPYS | 1415 |
| 149364 | RSSQSLLHSNGYNYLD | 1336 | LGSNRAS | 1376 | MQALQTPYT | 1416 |
| 149365 | GGNNIGTKSVH | 1337 | DDSVRPS | 1377 | QVWDSDSEHV | 1417 |
| | | | | | V | |
| 149366 | SGDGLSKKYVS | 1338 | RDKERPS | 1378 | QAWDDTTVV | 1418 |
| 149367 | RASQGIRNWLA | 1339 | AASNLQS | 1379 | QKYNSAPFT | 1419 |
| 149368 | GGNNIGSKSVH | 1340 | GKNNRPS | 1380 | SSRDSSGDHLR | 1420 |
| | | | | | V | |
| 149369 | QGDSLGNYYAT | 1341 | GTNNRPS | 1381 | NSRDSSGHHLL | 1421 |
| BCMA_EB | RASQSVSSAYLA | 1342 | GASTRAT | 1382 | QHYGSSFNGSS | 1422 |
| B-C1978- | | | | | LFT | |
| A4 | | | | | | |
| BCMA_EB | RASQSVSNSLA | 1343 | DASSRAT | 1383 | QQFGTSSGLT | 1423 |
| B-C1978- | | | | | | |
| G1 | | | | | | |
| BCMA_EB | RASQSVSSSFLA | 1344 | GASSRAT | 1384 | QQYHSSPSWT | 1424 |
| B-C1979- | | | | | | |
| C1 | | | | | | |
| BCMA_EB | RASQSVSTTFLA | 1345 | GSSNRAT | 1385 | QQYHSSPSWT | 1425 |
| B-C1978- | | | | | | |
| C7 | | | | | | |
| BCMA_EB | RASQSISSYLN | 1346 | AASSLQS | 1386 | QQSYSTPYS | 1426 |
| B-C1978- | | | | | | |
| D10 | | | | | | |
| BCMA_EB | RATQSIGSSFLA | 1347 | GASQRAT | 1387 | QHYESSPSWT | 1427 |
| B-C1979- | | | | | | |
| C12 | | | | | | |
| BCMA_EB | RASQSVSSSYLA | 1348 | GASSRAT | 1388 | QQYGSPPRFT | 1428 |
| B-C1980- | | | | | | |
| G4 | | | | | | |
| BCMA_EB | RASQSVSSSYLA | 1349 | GASSRAT | 1389 | QHYGSSPSWT | 1429 |
| B-C1980- | | | | | | |
| D2 | | | | | | |
| BCMA_EB | RASQRVASNYLA | 1350 | GASSRAT | 1390 | QHYDSSPSWT | 1430 |
| B-C1978- | | | | | | |
| A10 | | | | | | |
| BCMA_EB | RASQSLSSNFLA | 1351 | GASNVVAT | 1391 | QYYGTSPMYT | 1431 |
| B-C1978- | | | | | | |
| D4 | | | | | | |
| BCMA_EB | RSSQSLLHSNGYNYLD | 1352 | LGSNRAS | 1392 | MQALQTPLT | 1432 |
| B-C1980- | | | | | | |
| A2 | | | | | | |
| BCMA_EB | RASQSVSSSYLA | 1353 | GTSSRAT | 1393 | QHYGNSPPKFT | 1433 |
| B-C1981- | | | | | | |
| C3 | | | | | | |
| BCMA_EB | RASQSVASSFLA | 1354 | GASGRAT | 1394 | QHYGGSPRLT | 1434 |
| B-C1978- | | | | | | |
| G4 | | | | | | |
| A7D12.2 | RASQDVNTAVS | 1355 | SASYRYT | 1395 | QQHYSTPWT | 1435 |
| C11D5.3 | RASESVSVIGAHLIH | 1356 | LASNLET | 1396 | LQSRIFPRT | 1436 |
| C12A3.2 | RASESVTILGSHLIY | 1357 | LASNVQT | 1397 | LQSRTIPRT | 1437 |
| C13F12.1 | RASESVTILGSHLIY | 1358 | LASNVQT | 1398 | LQSRTIPRT | 1438 |

TABLE 9
Heavy Chain Variable Domain CDRs according
to the Chothia numbering scheme
(A1-Lazikani et al., (1997) JMB 273,927-948)

| Candidate | HCDR1 | ID | HCDR2 | ID | HCDR3 | ID |
|---|---|---|---|---|---|---|
| 139109 | GFALSNH | 1439 | VYSGS | 1479 | HGGESDV | 1519 |
| 139103 | GFTFSNY | 1440 | SRSGEN | 1480 | SPAHYYG | 1520 |
| | | | | | GMDV | |
| 139105 | GFTFDDY | 1441 | SWNSGS | 1481 | HSFLAY | 1521 |
| 139111 | GFALSNH | 1442 | VYSGS | 1482 | HGGESDV | 1522 |
| 139100 | GYIFDNF | 1443 | NPKNNN | 1483 | GPYYYQS | 1523 |
| | | | | | YMDV | |
| 139101 | GFTFSSD | 1444 | SGSGGT | 1484 | LDSSGYY | 1524 |
| | | | | | YARGPRY | |
| 139102 | GYTFSNY | 1445 | SAYNGN | 1485 | GPYYYYM | 1525 |
| | | | | | DV | |
| 139104 | GFALSNH | 1446 | VYSGS | 1486 | HGGESDV | 1526 |
| 139106 | GFALSNH | 1447 | VYSGS | 1487 | HGGESDV | 1527 |
| 139107 | GFALSNH | 1448 | VYSGS | 1488 | HGGESDV | 1528 |
| 139108 | GFTFSDY | 1449 | SSSGST | 1489 | ESGDGMDV | 1529 |
| 139110 | GFTFSDY | 1450 | SSSGNT | 1490 | STMVREDY | 1530 |
| 139112 | GFALSNH | 1451 | VYSGS | 1491 | HGGESDV | 1531 |
| 139113 | GFALSNH | 1452 | VYSGS | 1492 | HGGESDV | 1532 |
| 139114 | GFALSNH | 1453 | VYSGS | 1493 | HGGESDV | 1533 |
| 149362 | GGSISSSYY | 1454 | YYSGS | 1494 | HWQEWPDA | 1534 |
| | | | | | FDI | |
| 149363 | GFSLRTSGM | 1455 | DWDED | 1495 | SGAGGTSA | 1535 |
| | | | | | TAFDI | |
| 149364 | GFTFSSY | 1456 | SSSSSY | 1496 | TIAAVYAF | 1536 |
| | | | | | DI | |
| 149365 | GFTFSDY | 1457 | SSSGST | 1497 | DLRGAFDI | 1537 |
| 149366 | GYTVTSH | 1458 | NPSGGV | 1498 | EGSGSGWY | 1538 |
| | | | | | FDF | |
| 149367 | GGSISSGGY | 1459 | YYSGS | 1499 | AGIAARLR | 1539 |
| | | | | | GAFDI | |
| 149368 | GGTFSSY | 1460 | IPIFGT | 1500 | RGGYQLLR | 1540 |
| | | | | | WDVGLLRS | |
| | | | | | AFDI | |
| 149369 | GDSVSSNSA | 1461 | YYRSKWY | 1501 | SSPEGLFL | 1541 |
| | | | | | YWFDP | |
| BCMA_EBB- | GFTFSSY | 1462 | SGSGGS | 1502 | VEGSGSLD | 1542 |
| C1978-A4 | | | | | Y | |
| BCMA_EBB- | G1TFSRY | 1463 | SDSGVS | 1503 | RAGSEASD | 1543 |
| C1978-G1 | | | | | I | |
| BCMA_EBB- | GFTFSSY | 1464 | SGSGGS | 1504 | ATYKRELR | 1544 |
| C1979-C1 | | | | | YYYGMDV | |
| BCMA_EBB- | GFTFSSY | 1465 | SGSGGS | 1505 | ATYKRELR | 1545 |
| C1978-C7 | | | | | YYYGMDV | |
| BCMA_EBB- | GFTFDDY | 1466 | SWNSGS | 1506 | VGKAVPDV | 1546 |
| C1978-D10 | | | | | | |
| BCMA_EBB- | GFTFDDY | 1467 | NWKGNS | 1507 | HQGVAYYN | 1547 |
| C1979-C12 | | | | | YAMDV | |
| BCMA_EBB- | GFTFSSY | 1468 | SGSGGS | 1508 | VVRDGMDV | 1548 |
| C1980-G4 | | | | | | |
| BCMA_EBB- | GFTFSSY | 1469 | SGSGGS | 1509 | IPQTGTFD | 1549 |
| C1980-D2 | | | | | Y | |
| BCMA_EBB- | GFTFSSY | 1470 | SGSGGS | 1510 | ANYKRELR | 1550 |
| C1978-A10 | | | | | YYYGMDV | |
| BCMA_EBB- | GFSFSSY | 1471 | SGSGGS | 1511 | ALVGATGA | 1551 |
| C1978-D4 | | | | | FDI | |
| BCMA_EBB- | GFTFSSY | 1472 | SGSGGS | 1512 | WFGEGFDP | 1552 |
| C1980-A2 | | | | | | |
| BCMA_EBB- | GFTFSSY | 1473 | SGSGGS | 1513 | VGYDSSGY | 1553 |
| C1981-C3 | | | | | YRDYYGMD | |
| | | | | | V | |
| BCMA_EBB- | GFTFSSY | 1474 | SGSGGS | 1514 | MGWSSGYL | 1554 |
| C1978-G4 | | | | | GAFDI | |
| A7D12.2 | GYTFTNF | 1475 | NTYTGE | 1515 | GEIYYGYD | 1555 |
| | | | | | GGFAY | |
| C11D5.3 | GYTFTDY | 1476 | NTETRE | 1516 | DYSYAMDY | 1556 |
| C12A3.2 | GYTFRHY | 1477 | NTESGV | 1517 | DYLYSLDF | 1557 |
| C13F12.1 | GYTFTHY | 1478 | NTETGE | 1518 | DYLYSCDY | 1558 |

TABLE 10
Light Chain Variable Domain CDRs according
to the Chothia numbering scheme
(A1-Lazikani et al., (1997) JMB 273,927-948)

| Candidate | LCDR1 | ID | LCDR2 | ID | LCDR3 | ID |
|---|---|---|---|---|---|---|
| 139109 | SQSISSY | 1559 | AAS | 1599 | SYSTPY | 1639 |
| 139103 | SQSISSSF | 1560 | GAS | 1600 | YHSSPSW | 1640 |
| 139105 | SQSLLHSNGYNY | 1561 | LGS | 1601 | ALQTPY | 1641 |
| 139111 | SQSLLRNDGKTP | 1562 | EVS | 1602 | NIQFP | 1642 |
| 139100 | SQSLLHSNGYNY | 1563 | LGS | 1603 | ALQTPY | 1643 |
| 139101 | SQSISSY | 1564 | GAS | 1604 | SYKRA | 1644 |
| 139102 | SQSLLYSNGYNY | 1565 | LGS | 1605 | GRQFPY | 1645 |
| 139104 | SQSVSSN | 1566 | GAS | 1606 | YGSSL | 1646 |
| 139106 | SQSVSSK | 1567 | GAS | 1607 | YGSSSW | 1647 |
| 139107 | SQSVGSTN | 1568 | DAS | 1608 | YGSSPPW | 1648 |
| 139108 | SQSISSY | 1569 | AAS | 1609 | SYTL | 1649 |
| 139110 | SESLVHNSGKTY | 1570 | EVS | 1610 | GTHWPG | 1650 |
| 139112 | SEDINKF | 1571 | DAS | 1611 | YESLPL | 1651 |
| 139113 | SQSVGSN | 1572 | GAS | 1612 | YNDWLPV | 1652 |
| 139114 | SQSIGSSS | 1573 | GAS | 1613 | YAGSPPF | 1653 |
| 149362 | SQDIDDA | 1574 | SAT | 1614 | HDNFPL | 1654 |
| 149363 | SQDIYNN | 1575 | AAN | 1615 | yyRFpy | 1655 |
| 149364 | SQSLLHSNGYNY | 1576 | LGS | 1616 | ALQTPY | 1656 |
| 149365 | NNIGTKS | 1577 | DDS | 1617 | WDSDSEHV | 1657 |
| 149366 | DGLSKKY | 1578 | RDK | 1618 | WDDTTV | 1658 |
| 149367 | SQGIRNW | 1579 | AAS | 1619 | YNSAPF | 1659 |
| 149368 | NNIGSKS | 1580 | GKN | 1620 | RDSSGDHLR | 1660 |
| 149369 | DSLGNYY | 1581 | GTN | 1621 | RDSSGHHL | 1661 |
| BCMA_EBB- | SQSVSSAY | 1582 | GAS | 1622 | YGSSFNGSS | 1662 |
| C1978-A4 | | | | | LF | |
| BCMA_EBB- | SQSVSNS | 1583 | DAS | 1623 | FGTSSGL | 1663 |
| C1978-G1 | | | | | | |
| BCMA_EBB- | SQSVSSSF | 1584 | GAS | 1624 | YHSSPSW | 1664 |
| C1979-C1 | | | | | | |
| BCMA_EBB- | SQSVSTTF | 1585 | GSS | 1625 | YHSSPSW | 1665 |
| C1978-C7 | | | | | | |
| BCMA_EBB- | SQSISSY | 1586 | AAS | 1626 | SYSTPY | 1666 |
| C1978-D10 | | | | | | |
| BCMA_EBB- | TQSIGSSF | 1587 | GAS | 1627 | YESSPSW | 1667 |
| C1979-C12 | | | | | | |
| BCMA_EBB- | SQSVSSSY | 1588 | GAS | 1628 | YGSPPRF | 1668 |
| C1980-G4 | | | | | | |
| BCMA_EBB- | SQSVSSSY | 1589 | GAS | 1629 | YGSSPSW | 1669 |
| C1980-D2 | | | | | | |
| BCMA_EBB- | SQRVASNY | 1590 | GAS | 1630 | YDSSPSW | 1670 |
| C1978-A10 | | | | | | |
| BCMA_EBB- | SQSLSSNF | 1591 | GAS | 1631 | YGTSPMY | 1671 |
| C1978-D4 | | | | | | |
| BCMA_EBB- | SQSLLHSNGYNY | 1592 | LGS | 1632 | ALQTPL | 1672 |
| C1980-A2 | | | | | | |
| BCMA_EBB- | SQSVSSSY | 1593 | GTS | 1633 | YGNSPPKF | 1673 |
| C1981-C3 | | | | | | |
| BCMA_EBB- | SQSVASSF | 1594 | GAS | 1634 | YGGSPRL | 1674 |
| C1978-G4 | | | | | | |
| A7D12.2 | SQDVNTA | 1595 | SAS | 1635 | HYSTPW | 1675 |
| C11D5.3 | SESVSVIGAHL | 1596 | LAS | 1636 | SRIFPR | 1676 |
| C12A3.2 | SESVTILGSHL | 1597 | LAS | 1637 | SRTIPR | 1677 |
| C13F12.1 | SESVTILGSHL | 1598 | LAS | 1638 | SRTIPR | 1678 |

TABLE 11
Heavy Chain Variable Domain CDRs according to a combination of
the Kabat numbering scheme (Kabat et al. (1991), “Sequences of
Proteins of Immunological Interest,” 5th Ed. Public Health
Service, National Institutes of Health, Bethesda, MD) and the
Chothia numbering scheme (A1-Lazikani et al., (1997) JMB
273,927-948).

| Candidate | HCDR1 | ID | HCDR2 | ID | HCDR3 | ID |
|---|---|---|---|---|---|---|
| 139109 | GFALSNHGMS | 1679 | GIVYSGSTYYAASVKG | 1719 | HGGESDV | 1759 |
| 139103 | GFTFSNYAMS | 1680 | GISRSGENTYYADSVKG | 1720 | SPAHYYGGMDV | 1760 |
| 139105 | GFTFDDYAMH | 1681 | GISWNSGSIGYADSVKG | 1721 | HSFLAY | 1761 |
| 139111 | GFALSNHGMS | 1682 | GIVYSGSTYYAASVKG | 1722 | HGGESDV | 1762 |
| 139100 | GYIFDNFGIN | 1683 | WINPKNNNTNYAQKFQG | 1723 | GPYYYQSYMDV | 1763 |
| 139101 | GFTFSSDAMT | 1684 | VISGSGGTTYYADSVKG | 1724 | LDSSGYYYARGPRY | 1764 |
| 139102 | GYTESNYGIT | 1685 | WISAYNGNTNYAOKFQG | 1725 | GPYYYYMDV | 1765 |
| 139104 | GFALSNHGMS | 1686 | GIVYSGSTYYAASVKG | 1726 | HGGESDV | 1766 |
| 139106 | GFALSNHGMS | 1687 | GIVYSGSTYYAASVKG | 1727 | HGGESDV | 1767 |
| 139107 | GFALSNHGMS | 1688 | GIVYSGSTYYAASVKG | 1728 | HGGESDV | 1768 |
| 139108 | GFTFSDYYMS | 1689 | YISSSGSTIYYADSVKG | 1729 | ESGDGMDV | 1769 |
| 139110 | GFTFSDYYMS | 1690 | YISSSGNTIYYADSVKG | 1730 | STMVREDY | 1770 |
| 139112 | GFALSNHGMS | 1691 | GIVYSGSTYYAASVKG | 1731 | HGGESDV | 1771 |
| 139113 | GFALSNHGMS | 1692 | GIVYSGSTYYAASVKG | 1732 | HGGESDV | 1772 |
| 139114 | GFALSNHGMS | 1693 | GIVYSGSTYYAASVKG | 1733 | HGGESDV | 1773 |
| 149362 | GGSISSSYYY | 1694 | SIVYSGSAYYNPSLKS | 1734 | HWQEWPDAFDI | 1774 |
| | WG | | | | | |
| 149363 | GFSLRTSGMC | 1695 | RIDWDEDKFYSTSLKT | 1735 | SGAGGTSATAFDI | 1775 |
| | VS | | | | | |
| 149364 | GFTFSSYSMN | 1696 | SISSSSSYIYYADSVKG | 1736 | TIAAVYAFDI | 1776 |
| 149365 | GFTFSDYYMS | 1697 | YISSSGSTIYYADSVKG | 1737 | DLRGAFDI | 1777 |
| 149366 | GYTVTSHYIH | 1698 | MINPSGGVTAYSQTLQG | 1738 | EGSGSGWYFDF | 1778 |
| 149367 | GGSISSGGYY | 1699 | YIYYSGSTYYNPSLKS | 1739 | AGIAARLRGAFDI | 1779 |
| | WS | | | | | |
| 149368 | GGTFSSYAIS | 1700 | GIIPIFGTANYAQKFQG | 1740 | RGGYQLLRWDVGLL | 1780 |
| | | | | | RSAFDI | |
| 149369 | GDSVSSNSAA | 1701 | RTYYRSKWYSFYAISLKS | 1741 | SSPEGLFLYWFDP | 1781 |
| | WN | | | | | |
| BCMAJEBB- | GFTFSSYAMS | 1702 | AISGSGGSTYYADSVKG | 1742 | VEGSGSLDY | 1782 |
| C1978-A4 | | | | | | |
| BCMA_EBB- | GITFSRYPMS | 1703 | GISDSGVSTYYADSAKG | 1743 | RAGSEASDI | 1783 |
| C1978-G1 | | | | | | |
| BCMA_EBB- | GFTFSSYAMS | 1704 | AISGSGGSTYYADSVKG | 1744 | ATYKRELRYYYGMD | 1784 |
| C1979-C1 | | | | | V | |
| BCMA_EBB- | GFTFSSYAMS | 1705 | AISGSGGSTYYADSVKG | 1745 | ATYKRELRYYYGMD | 1785 |
| C1978-C7 | | | | | V | |
| BCMA_EBB- | GFTFDDYAMH | 1706 | GISWNSGSIGYADSVKG | 1746 | VGKAVPDV | 1786 |
| C1978-D10 | | | | | | |
| BCMA_EBB- | GFTFDDYAMH | 1707 | SIMVKGNSLAYGDSVKG | 1747 | HQGVAYYNYAMDV | 1787 |
| C1979-C12 | | | | | | |
| BCMA_EBB- | GFTFSSYAMS | 1708 | AISGSGGSTYYADSVKG | 1748 | VVRDGMDV | 1788 |
| C1980-G4 | | | | | | |
| BCMA_EBB- | GFTFSSYAMS | 1709 | AISGSGGSTYYADSVKG | 1749 | IPQTGTFDY | 1789 |
| C1980-D2 | | | | | | |
| BCMA_EBB- | GFTFSSYAMS | 1710 | AISGSGGSTYYADSVKG | 1750 | ANYKRELRYYYGMD | 1790 |
| C1978-A10 | | | | | V | |
| BCMA_EBB- | GFSFSSYAMS | 1711 | AISGSGGSTYYADSVKG | 1751 | ALVGATGAFDI | 1791 |
| C1978-D4 | | | | | | |
| BCMA_EBB- | GFTFSSYAMS | 1712 | AISGSGGSTYYADSVKG | 1752 | WFGEGFDP | 1792 |
| C1980-A2 | | | | | | |
| BCMA_EBB- | GFTFSSYAMS | 1713 | AISGSGGSTYYADSVKG | 1753 | VGYDSSGYYRDYYG | 1793 |
| C1981-C3 | | | | | MDV | |
| BCMA_EBB- | GFTFSSYAMS | 1714 | AISGSGGSTYYADSVKG | 1754 | MGWSSGYLGAFDI | 1794 |
| C1978-G4 | | | | | | |
| A7D12.2 | GYTFTNFGMN | 1715 | WINTYTGESYFADDFKG | 1755 | GEIYYGYDGGFAY | 1795 |
| C11D5.3 | GYTFTDYSIN | 1716 | WINTETREPAYAYDFRG | 1756 | DYSYAMDY | 1796 |
| C12A3.2 | GYTFRHYSMN | 1717 | RINTESGVPIYADDFKG | 1757 | DYLYSLDF | 1797 |
| C13F12.1 | GYTFTHYSMN | 1718 | RINTETGEPLYADDFKG | 1758 | DYLYSCDY | 1798 |

TABLE 12
Light Chain Variable Domain CDRs according to a combination of
the Kabat numbering scheme (Kabat et al. (1991), “Sequences of
Proteins of Immunological Interest,” 5th Ed. Public Health
Service, National Institutes of Health, Bethesda, MD) and the
Chothia numbering scheme (A1-Lazikani et al., (1997) JMB
273,927-948).

| Candidate | LCDR1 | ID | LCDR2 | ID | LCDR3 | ID |
|---|---|---|---|---|---|---|
| 139109 | RASQSISSYLN | 1799 | AASSLQS | 1839 | QQSYSTPYT | 1879 |
| 139103 | RASQSISSSFLA | 1800 | GASRRAT | 1840 | QQYHSSPSWT | 1880 |
| 139105 | RSSQSLLHSNGYNYLD | 1801 | LGSNRAS | 1841 | MQALQTPYT | 1881 |
| 139111 | KSSQSLLRNDGKTPLY | 1802 | EVSNRFS | 1842 | MQNIQFPS | 1882 |
| 139100 | RSSQSLLHSNGYNYLN | 1803 | LGSKRAS | 1843 | MQALQTPYT | 1883 |
| 139101 | RASQSISSYLN | 1804 | GASTLAS | 1844 | QQSYKRAS | 1884 |
| 139102 | RSSQSLLYSNGYNYVD | 1805 | LGSNRAS | 1845 | MQGRQFPYS | 1885 |
| 139104 | RASQSVSSNLA | 1806 | GASTRAS | 1846 | QQYGSSLT | 1886 |
| 139106 | RASQSVSSKLA | 1807 | GASIRAT | 1847 | QQYGSSSWT | 1887 |
| 139107 | RASQSVGSTNLA | 1808 | DASNRAT | 1848 | QQYGSSPPWT | 1888 |
| 139108 | RASQSISSYLN | 1809 | AASSLQS | 1849 | QQSYTLA | 1889 |
| 139110 | KSSESLVHNSGKTYLN | 1810 | EVSNRDS | 1850 | MQGTHWPGT | 1890 |
| 139112 | QASEDINKFLN | 1811 | DASTLQT | 1851 | QQYESLPLT | 1891 |
| 139113 | RASQSVGSNLA | 1812 | GASTRAT | 1852 | QQYNDWLPVT | 1892 |
| 139114 | RASQSIGSSSLA | 1813 | GASSRAS | 1853 | QQYAGSPPFT | 1893 |
| 149362 | KASQDIDDAMN | 1814 | SATSPVP | 1854 | LQHDNFPLT | 1894 |
| 149363 | RASQDIYNNLA | 1815 | AANKSQS | 1855 | QHYYRFPYS | 1895 |
| 149364 | RSSQSLLHSNGYNYLD | 1816 | LGSNRAS | 1856 | MQALQTPYT | 1896 |
| 149365 | GGNNIGTKSVH | 1817 | DDSVRPS | 1857 | QVWDSDSEHV | 1897 |
| | | | | | V | |
| 149366 | SGDGLSKKYVS | 1818 | RDKERPS | 1858 | QAWDDTTVV | 1898 |
| 149367 | RASQGIRNWLA | 1819 | AASNLQS | 1859 | QKYNSAPFT | 1899 |
| 149368 | GGNNIGSKSVH | 1820 | GKNNRPS | 1860 | SSRDSSGDHL | 1900 |
| | | | | | RV | |
| 149369 | QGDSLGNYYAT | 1821 | GTNNRPS | 1861 | NSRDSSGHHL | 1901 |
| | | | | | L | |
| BCMA_EBB- | RASQSVSSAYLA | 1822 | GASTRAT | 1862 | QHYGSSFNGS | 1902 |
| C1978-A4 | | | | | SLFT | |
| BCMA_EBB- | RASQSVSNSLA | 1823 | DASSRAT | 1863 | QQFGTSSGLT | 1903 |
| C1978-G1 | | | | | | |
| BCMA_EBB- | RASQSVSSSFLA | 1824 | GASSRAT | 1864 | QQYHSSPSWT | 1904 |
| C1979-C1 | | | | | | |
| BCMA_EBB- | RASQSVSTTFLA | 1825 | GSSNRAT | 1865 | QQYHSSPSWT | 1905 |
| C1978-C7 | | | | | | |
| BCMA_EBB- | RASQSISSYLN | 1826 | AASSLQS | 1866 | QQSYSTPYS | 1906 |
| C1978-D10 | | | | | | |
| BCMA_EBB- | RATQSIGSSFLA | 1827 | GASQRAT | 1867 | QHYESSPSWT | 1907 |
| C1979-C12 | | | | | | |
| BGMAJEBB- | RASQSVSSSYLA | 1828 | GASSRAT | 1868 | QQYGSPPRFT | 1908 |
| C1980-G4 | | | | | | |
| BCMA_EBB- | RASQSVSSSYLA | 1829 | GASSRAT | 1869 | QHYGSSPSWT | 1909 |
| C1980-D2 | | | | | | |
| BCMA_EBB- | RASQRVASNYLA | 1830 | GASSRAT | 1870 | QHYDSSPSWT | 1910 |
| C1978-A10 | | | | | | |
| BCMA_EBB- | RASQSLSSNFLA | 1831 | GASNWAT | 1871 | QYYGTSPMYT | 1911 |
| C1978-D4 | | | | | | |
| BCMA_EBB- | RSSQSLLHSNGYNYLD | 1832 | LGSNRAS | 1872 | MQALQTPLT | 1912 |
| C1980-A2 | | | | | | |
| BCMA_EBB- | RASQSVSSSYLA | 1833 | GTSSRAT | 1873 | QHYGNSPPKFT | 1913 |
| C1981-C3 | | | | | | |
| BCMA_EBB- | RASQSVASSFLA | 1834 | GASGRAT | 1874 | QHYGGSPRLT | 1914 |
| C1978-G4 | | | | | | |
| A7D12.2 | RASQDVNTAVS | 1835 | SASYRYT | 1875 | QQHYSTPWT | 1915 |
| C11D5.3 | RASESVSVIGAHLIH | 1836 | LASNLET | 1876 | LQSRIFPRT | 1916 |
| C12A3.2 | RASESVTILGSHLIY | 1837 | LASNVQT | 1877 | LQSRTIPRT | 1917 |
| C13F12.1 | RASESVTILGSHLIY | 1838 | LASNVQT | 1878 | LQSRTIPRT | 1918 |

[0708] In certain embodiments, the CAR molecule described herein (e.g., the CAR nucleic acid or the CAR polypeptide) or a BCMA binding domain includes:

(1) one, two, or three light chain (LC) CDRs chosen from one of the following:

[0709] (i) a LC CDR1 of SEQ ID NO: 1320, LC CDR2 of SEQ ID NO: 1360 and LC CDR3 of SEQ ID NO: 1400 of BCMA-4 CAR (139103);

[0710] (ii) a LC CDR1 of SEQ ID NO: 1319, LC CDR2 of SEQ ID NO: 1359 and LC CDR3 of SEQ ID NO: 1399 of BCMA-10 CAR (139109);

[0711] (iii) a LC CDR1 of SEQ ID NO: 1331, LC CDR2 of SEQ ID NO: 1371 and LC CDR3 of SEQ ID NO: 1411 of BCMA-13 CAR (139112); or

[0712] (iv) a LC CDR1 of SEQ ID NO: 1333, LC CDR2 of SEQ ID NO: 1373 and LC CDR3 of SEQ ID NO: 1413 of BCMA-15 CAR (139114), and/or

(2) one, two, or three heavy chain (HC) CDRs from one of the following:

[0713] (i) a HC CDR1 of SEQ ID NO: 1200, HC CDR2 of SEQ ID NO: 1240 and HC CDR3 of SEQ ID NO: 1280 of BCMA-4 CAR (139103);

[0714] (ii) a HC CDR1 of SEQ ID NO: 1199, HC CDR2 of SEQ ID NO: 1239 and HC CDR3 of SEQ ID NO: 1279 of BCMA-10 CAR (139109);

[0715] (iii) a HC CDR1 of SEQ ID NO: 1121, HC CDR2 of SEQ ID NO: 1251 and HC CDR3 of SEQ ID NO: 1291 of BCMA-13 CAR (139112); or

[0716] (iv) a HC CDR1 of SEQ ID NO: 1213, HC CDR2 of SEQ ID NO: 1253 and HC CDR3 of SEQ ID NO: 1293 of BCMA-15 (139114).

[0717] In certain embodiments, the CAR molecule described herein (e.g., the CAR nucleic acid or the CAR polypeptide) includes:

(1) one, two, or three light chain (LC) CDRs chosen from one of the following:

[0718] (i) a LC CDR1 of SEQ ID NO: 1560, LC CDR2 of SEQ ID NO: 1600 and LC CDR3 of SEQ ID NO: 1640 of BCMA-4 CAR (139103);

[0719] (ii) a LC CDR1 of SEQ ID NO: 1559, LC CDR2 of SEQ ID NO: 1599 and LC CDR3 of SEQ ID NO: 1639 of BCMA-10 CAR (139109);

[0720] (iii) a LC CDR1 of SEQ ID NO: 1571, LC CDR2 of SEQ ID NO: 1611 and LC CDR3 of SEQ ID NO: 1651 of BCMA-13 CAR (139112); or

[0721] (iv) a LC CDR1 of SEQ ID NO: 1573, LC CDR2 of SEQ ID NO: 1613 and LC CDR3 of SEQ ID NO: 1653 of BCMA-15 CAR (139114); and/or

(2) one, two, or three heavy chain (HC) CDRs chosen from one of the following:

[0722] (i) a HC CDR1 of SEQ ID NO: 1440, HC CDR2 of SEQ ID NO: 1480 and HC CDR3 of SEQ ID NO: 1520 of BCMA-4 CAR (139103);

[0723] (ii) a HC CDR1 of SEQ ID NO: 1439, HC CDR2 of SEQ ID NO: 1479 and HC CDR3 of SEQ ID NO: 1519 of BCMA-10 CAR (139109);

[0724] (iii) a HC CDR1 of SEQ ID NO: 1451, HC CDR2 of SEQ ID NO: 1491 and HC CDR3 of SEQ ID NO: 1531 of BCMA-13 CAR (139112); or

[0725] (iv) a HC CDR1 of SEQ ID NO: 1453, HC CDR2 of SEQ ID NO: 1493 and HC CDR3 of SEQ ID NO: 1533 of BCMA-15 CAR (139114).

[0726] In certain embodiments, the CAR molecule described herein (e.g., the CAR nucleic acid or the CAR polypeptide) includes:

(1) one, two, or three light chain (LC) CDRs chosen from one of the following:

[0727] (i) a LC CDR1 of SEQ ID NO: 1800 LC CDR2 of SEQ ID NO: 1840 and LC CDR3 of SEQ ID NO: 1880 of BCMA-4 CAR (139103);

[0728] (ii) a LC CDR1 of SEQ ID NO: 1799, LC CDR2 of SEQ ID NO: 1839 and LC CDR3 of SEQ ID NO: 1879 of BCMA-10 CAR (139109);

[0729] (iii) a LC CDR1 of SEQ ID NO: 1811, LC CDR2 of SEQ ID NO: 1851 and LC CDR3 of SEQ ID NO: 1891 of BCMA-13 CAR (139112); or

[0730] (iv) a LC CDR1 of SEQ ID NO: 1813, LC CDR2 of SEQ ID NO: 1853 and LC CDR3 of SEQ ID NO: 1893 of BCMA-15 CAR (139114); and/or

(2) one, two, or three heavy chain (HC) CDRs chosen from one of the following:

[0731] (i) a HC CDR1 of SEQ ID NO: 1680, HC CDR2 of SEQ ID NO: 1720 and HC CDR3 of SEQ ID NO: 1760 of BCMA-4 CAR (139103);

[0732] (ii) a HC CDR1 of SEQ ID NO: 1679, HC CDR2 of SEQ ID NO: 1719 and HC CDR3 of SEQ ID NO: 1759 of BCMA-10 CAR (139109);

[0733] (iii) a HC CDR1 of SEQ ID NO: 1691, HC CDR2 of SEQ ID NO: 1731 and HC CDR3 of SEQ ID NO: 1771 of BCMA-13 CAR (139112);

[0734] (iv) a HC CDR1 of SEQ ID NO: 1693, HC CDR2 of SEQ ID NO: 1733 and HC CDR3 of SEQ ID NO: 1773 of BCMA-15 CAR (139114).

### Exemplary Components of the CAR Molecules:

Leader (amino acid sequence)
(SEQ ID NO: 1919)
MALPVTALLLPLALLLHAARP
leader (nucleic acid sequence)
(SEQ ID NO: 1920)
ATGGCCCTGCCTGTGACAGCCCTGCTGCTGCCTCTGGCTCTGCTGCTGCA
TGCCGCTAGACCC
leader (nucleic acid sequence)
(SEQ ID NO: 2000)
ATGGCCCTCCCTGTCACCGCCCTGCTGCTTCCGCTGGCTCTTCTGCTCCA
CGCCGCTCGGCCC
CD8 hinge (amino acid sequence)
(SEQ ID NO: 1921)
TTTPAPRPPTPAPTIASQPLSLRPEACRPAAGGAVHTRGLDFACD
CD8 hinge (nucleic acid sequence)
(SEQ ID NO: 1922)
ACCACGACGCCAGCGCCGCGACCACCAACACCGGCGCCCACCATCGCGTC
GCAGCCCCTGTCCCTGCGCCCAGAGGCGTGCCGGCCAGCGGCGGGGGGCG
CAGTGCACACGAGGGGGCTGGACTTCGCCTGTGAT
CD8 transmembrane (amino acid sequence)
(SEQ ID NO: 1923)
IYIWAPLAGTCGVLLLSLVITLYC
CD8 transmembrane (nucleic acid sequence)
(SEQ ID NO: 1924)
ATCTACATCTGGGCGCCCTTGGCCGGGACTTGTGGGGTCCTTCTCCTGTC
ACTGGTTATCACCCTTTACTGC
CD8 transmembrane (nucleic acid sequence)
(SEQ ID NO: 2001)
ATCTACATTTGGGCCCCTCTGGCTGGTACTTGCGGGGTCCTGCTGCTTTC
ACTCGTGATCACTCTTTACTGT
4-1BB Intracellular domain (amino acid
sequence)
(SEQ ID NO: 1925)
KRGRKKLLYIFKQPFMRPVQTTQEEDGCSCRFPEEEEGGCEL
4-1BB Intracellular domain (nucleic acid
sequence)
(SEQ ID NO: 1926)
AAACGGGGCAGAAAGAAACTCCTGTATATATTCAAACAACCATTTATGAG
ACCAGTACAAACTACTCAAGAGGAAGATGGCTGTAGCTGCCGATTTCCAG
AAGAAGAAGAAGGAGGATGTGAACTG
4-1BB Intracellular domain (nucleic acid
sequence)
(SEQ ID NO: 2002)
AAGCGCGGTCGGAAGAAGCTGCTGTACATCTTTAAGCAACCCTTCATGAG
GCCTGTGCAGACTACTCAAGAGGAGGACGGCTGTTCATGCCGGTTCCCAG
AGGAGGAGGAAGGCGGCTGCGAACTG
CD28 Intracellular domain (amino acid
sequence)
(SEQ ID NO: 1927)
RSKRSRLLHSDYMNMTPRRPGPTRKHYQPYAPPRDFAAYRS (SEQ ID
NO: 1927)
CD28 Intracellular domain (nucleotide
sequence)
(SEQ ID NO: 1928)
AGGAGTAAGAGGAGCAGGCTCCTGCACAGTGACTACATGAACATGACTCC
CCGCCGCCCCGGGCCCACCCGCAAGCATTACCAGCCCTATGCCCCACCAC
GCGACTTCGCAGCCTATCGCTCC (SEQ ID NO: 1928)
ICOS Intracellular domain (amino acid
sequence)
(SEQ ID NO: 1929)
T K K K Y S S S V H D P N G E Y M F M R A V N T A
K K S R L T D V T L (SEQ ID NO: 1929)
ICOS Intracellular domain (nucleotide
sequence)
(SEQ ID NO: 1930)
ACAAAAAAGAAGTATTCATCCAGTGTGCACGACCCTAACGGTGAATACAT
GTTCATGAGAGCAGTGAACACAGCCAAAAAATCCAGACTCACAGATGTGA
CCCTA (SEQ ID NO: 1930)
CD3 zeta domain (amino acid sequence)
(SEQ ID NO: 1931)
RVKFSRSADAPAYKQGQNQLYNELNLGRREEYDVLDKRRGRDPEMGGKPR
RKNPQEGLYNELQKDKMAEAYSEIGMKGERRRGKGHDGLYQGLSTATKDT
YDALHMQALPPR
CD3 zeta (nucleic acid sequence)
(SEQ ID NO: 1932)
AGAGTGAAGTTCAGCAGGAGCGCAGACGCCCCCGCGTACAAGCAGGGCCA
GAACCAGCTCTATAACGAGCTCAATCTAGGACGAAGAGAGGAGTACGATG
TTTTGGACAAGAGACGTGGCCGGGACCCTGAGATGGGGGGAAAGCCGAGA
AGGAAGAACCCTCAGGAAGGCCTGTACAATGAACTGCAGAAAGATAAGAT
GGCGGAGGCCTACAGTGAGATTGGGATGAAAGGCGAGCGCCGGAGGGGCA
AGGGGCACGATGGCCTTTACCAGGGTCTCAGTACAGCCACCAAGGACACC
TACGACGCCCTTCACATGCAGGCCCTGCCCCCTCGC
CD3 zeta (nucleic acid sequence)
(SEQ ID NO: 2003)
CGCGTGAAATTCAGCCGCAGCGCAGATGCTCCAGCCTACAAGCAGGGGCA
GAACCAGCTCTACAACGAACTCAATCTTGGTCGGAGAGAGGAGTACGACG
TGCTGGACAAGCGGAGAGGACGGGACCCAGAAATGGGCGGGAAGCCGCGC
AGAAAGAATCCCCAAGAGGGCCTGTACAACGAGCTCCAAAAGGATAAGAT
GGCAGAAGCCTATAGCGAGATTGGTATGAAAGGGGAACGCAGAAGAGGCA
AAGGCCACGACGGACTGTACCAGGGACTCAGCACCGCCACCAAGGACACC
TATGACGCTCTTCACATGCAGGCCCTGCCGCCTCGG
CD3 zeta domain (amino acid sequence; NCBI
Reference NM_000734.3)
(SEQ ID NO: 1933)
RVKFSRSADAPAYQQGQNQLYNELNLGRREEYDVLDKRRGRDPEMGGKPR
RKNPQEGLYNELQKDKMAEAYSEIGMKGERRRGKGHDGLYQGLSTATKDT
YDALHMQALPPR
CD3 zeta (nucleic acid sequence; NCBI
Reference Sequence NM_000734.3);
(SEQ ID NO: 1934)
AGAGTGAAGTTCAGCAGGAGCGCAGACGCCCCCGCGTACCAGCAGGGCCA
GAACCAGCTCTATAACGAGCTCAATCTAGGACGAAGAGAGGAGTACGATG
TTTTGGACAAGAGACGTGGCCGGGACCCTGAGATGGGGGGAAAGCCGAGA
AGGAAGAACCCTCAGGAAGGCCTGTACAATGAACTGCAGAAAGATAAGAT
GGCGGAGGCCTACAGTGAGATTGGGATGAAAGGCGAGCGCCGGAGGGGCA
AGGGGCACGATGGCCTTTACCAGGGTCTCAGTACAGCCACCAAGGACACC
TACGACGCCCTTCACATGCAGGCCCTGCCCCCTCGC
IgG4 Hinge (amino acid sequence)
(SEQ ID NO: 1935)
ESKYGPPCPPCPAPEFLGGPSVFLFPPKPKDTLMISRTPEVTCVVVDVSQ
EDPEVQFNWYVDGVEVHNAKTKPREEQFNSTYRVVSVLTVLHQDWLNGKE
YKCKVSNKGLPSSIEKTISKAKGQPREPQVYTLPPSQEEMTKNQVSLTCL
VKGFYPSDIAVEWESNGQPENNYKTTPPVLDSDGSFFLYSRLTVDKSRWQ
EGNVFSCSVMHEALHNHYTQKSLSLSLGKM
IgG4 Hinge (nucleotide sequence)
(SEQ ID NO: 1936)
GAGAGCAAGTACGGCCCTCCCTGCCCCCCTTGCCCTGCCCCCGAGTTCCT
GGGCGGACCCAGCGTGTTCCTGTTCCCCCCCAAGCCCAAGGACACCCTGA
TGATCAGCCGGACCCCCGAGGTGACCTGTGTGGTGGTGGACGTGTCCCAG
GAGGACCCCGAGGTCCAGTTCAACTGGTACGTGGACGGCGTGGAGGTGCA
CAACGCCAAGACCAAGCCCCGGGAGGAGCAGTTCAATAGCACCTACCGGG
TGGTGTCCGTGCTGACCGTGCTGCACCAGGACTGGCTGAACGGCAAGGAA
TACAAGTGTAAGGTGTCCAACAAGGGCCTGCCCAGCAGCATCGAGAAAAC
CATCAGCAAGGCCAAGGGCCAGCCTCGGGAGCCCCAGGTGTACACCCTGC
CCCCTAGCCAAGAGGAGATGACCAAGAACCAGGTGTCCCTGACCTGCCTG
GTGAAGGGCTTCTACCCCAGCGACATCGCCGTGGAGTGGGAGAGCAACGG
CCAGCCCGAGAACAACTACAAGACCACCCCCCCTGTGCTGGACAGCGACG
GCAGCTTCTTCCTGTACAGCCGGCTGACCGTGGACAAGAGCCGGTGGCAG
GAGGGCAACGTCTTTAGCTGCTCCGTGATGCACGAGGCCCTGCACAACCA
CTACACCCAGAAGAGCCTGAGCCTGTCCCTGGGCAAGATG

### Mesothelin CAR

[0736] In an embodiment, the CAR molecule comprises a mesothelin CAR described herein, e.g., a mesothelin CAR described in WO 2015/090230, incorporated herein by reference. In embodiments, the mesothelin CAR comprises an amino acid, or has a nucleotide sequence shown in WO 2015/090230 incorporated herein by reference, or a sequence substantially identical to any of the aforesaid sequences (e.g., at least 85%, 90%, 95% or more identical to any of the aforesaid mesothelin CAR sequences). In one embodiment, the CAR molecule comprises a mesothelin CAR, or an antigen binding domain according to Tables 2-3 of WO 2015/090230, incorporated herein by reference, or a sequence substantially identical thereto (e.g., at least 85%, 90%, 95% or more identical thereto). The amino acid and nucleotide sequences encoding the mesothelin CAR molecules and antigen binding domains (e.g., including one, two, three VH CDRs; and one, two, three VL CDRs according to Kabat or Chothia), are specified in WO 2015/090230.

### CLL-1 CAR

[0737] In an embodiment, the CAR molecule comprises a CLL1 CAR described herein, e.g., a CLL1 CAR described in US2016/0051651A1, incorporated herein by reference. In embodiments, the CLL1 CAR comprises an amino acid, or has a nucleotide sequence shown in US2016/0051651A1, incorporated herein by reference, or a sequence substantially identical to any of the aforesaid sequences (e.g., at least 85%, 90%, 95% or more identical to any of the aforesaid CLL1 CAR sequences).

[0738] In other embodiments, the CLL1 CAR includes a CAR molecule, or an antigen binding domain according to Table 2 of WO2016/014535, incorporated herein by reference, or a sequence substantially identical to any of the aforesaid sequences (e.g., at least 85%, 90%, 95% or more identical to any of the aforesaid CLL1 CAR sequences). The amino acid and nucleotide sequences encoding the CLL-1 CAR molecules and antigen binding domains (e.g., including one, two, three VH CDRs; and one, two, three VL CDRs according to Kabat or Chothia), are specified in WO2016/014535.

### CD33 CAR

[0739] In an embodiment, the CAR molecule comprises a CD33 CAR described herein, e.g., a CD33 CAR described in US2016/0096892A1, incorporated herein by reference. In embodiments, the CD33 CAR comprises an amino acid, or has a nucleotide sequence shown in US2016/0096892A1, incorporated herein by reference, or a sequence substantially identical to any of the aforesaid sequences (e.g., at least 85%, 90%, 95% or more identical to any of the aforesaid CD33 CAR sequences). In other embodiments, the CD33 CAR CAR or antigen binding domain thereof can include a CAR molecule (e.g., any of CAR33-1 to CAR-33-9), or an antigen binding domain according to Table 2 or 9 of WO2016/014576, incorporated herein by reference, or a sequence substantially identical to any of the aforesaid sequences (e.g., at least 85%, 90%, 95% or more identical to any of the aforesaid CD33 CAR sequences). The amino acid and nucleotide sequences encoding the CD33 CAR molecules and antigen binding domains (e.g., including one, two, three VH CDRs; and one, two, three VL CDRs according to Kabat or Chothia), are specified in WO2016/014576.

### CD123 CAR

[0740] In embodiments, the CAR molecule comprises a CD123 CAR described herein, e.g., a CD123 CAR described in US2014/0322212A1 or US2016/0068601A1, both incorporated herein by reference. In embodiments, the CD123 CAR comprises an amino acid, or has a nucleotide sequence shown in US2014/0322212A1 or US2016/0068601A1, both incorporated herein by reference, or a sequence substantially identical to any of the aforesaid sequences (e.g., at least 85%, 90%, 95% or more identical to any of the aforesaid CD123 CAR sequences). In one embodiment, the CAR molecule comprises a CD123 CAR (e.g., any of the CAR1-CAR8), or an antigen binding domain according to Tables 1-2 of WO 2014/130635, incorporated herein by reference, or a sequence substantially identical thereto (e.g., at least 85%, 90%, 95% or more identical to any of the aforesaid CD123 CAR sequences). The amino acid and nucleotide sequences encoding the CD123 CAR molecules and antigen binding domains (e.g., including one, two, three VH CDRs; and one, two, three VL CDRs according to Kabat or Chothia), are specified in WO 2014/130635.

[0741] In other embodiments, the CAR molecule comprises a CD123 CAR comprises a CAR molecule (e.g., any of the CAR123-1 to CAR123-4 and hzCAR123-1 to hzCAR123-32), or an antigen binding domain according to Tables 2, 6, and 9 of WO2016/028896, incorporated herein by reference, or a sequence substantially identical thereto (e.g., at least 85%, 90%, 95% or more identical to any of the aforesaid CD123 CAR sequences). The amino acid and nucleotide sequences encoding the CD123 CAR molecules and antigen binding domains (e.g., including one, two, three VH CDRs; and one, two, three VL CDRs according to Kabat or Chothia), are specified in WO2016/028896.

### EGFRvIII CAR

[0742] In an embodiment, the CAR molecule comprises an EGFRvIII CAR molecule described herein, e.g., an EGFRvIII CAR described US2014/0322275A1, incorporated herein by reference. In embodiments, the EGFRvIII CAR comprises an amino acid, or has a nucleotide sequence shown in US2014/0322275A1, incorporated herein by reference, or a sequence substantially identical to any of the aforesaid sequences (e.g., at least 85%, 90%, 95% or more identical to any of the aforesaid EGFRvIII CAR sequences). In one embodiment, the CAR molecule comprises an EGFRvIII CAR, or an antigen binding domain according to Table 2 or SEQ ID NO:11 of WO 2014/130657, incorporated herein by reference, or a sequence substantially identical thereto (e.g., at least 85%, 90%, 95% or more identical thereto). The amino acid and nucleotide sequences encoding the EGFRvIII CAR molecules and antigen binding domains (e.g., including one, two, three VH CDRs; and one, two, three VL CDRs according to Kabat or Chothia), are specified in WO 2014/130657.

### RNA Transfection

[0743] Disclosed herein are methods for producing an in vitro transcribed RNA anti-target CAR. The present invention also includes an anti-target CAR encoding RNA construct that can be directly transfected into a cell. A method for generating mRNA for use in transfection can involve in vitro transcription (IVT) of a template with specially designed primers, followed by polyA addition, to produce a construct containing 3′ and 5′ untranslated sequence (“UTR”), a 5′ cap and/or Internal Ribosome Entry Site (IRES), the nucleic acid to be expressed, and a polyA tail, typically 50-2000 bases in length (SEQ ID NO:32). RNA so produced can efficiently transfect different kinds of cells. In one aspect, the template includes sequences for the CAR.

[0744] In one aspect, an anti-target CAR of the present invention is encoded by a messenger RNA (mRNA). In one aspect, the mRNA encoding an anti-target CAR described herein is introduced into an immune effector cell, e.g., a T cell or a NK cell, for production of an anti-target CAR-expressing cell, e.g., a CART cell or a CAR NK cell.

[0745] In one embodiment, the in vitro transcribed RNA anti-target CAR can be introduced to a cell as a form of transient transfection. The RNA is produced by in vitro transcription using a polymerase chain reaction (PCR)-generated template. DNA of interest from any source can be directly converted by PCR into a template for in vitro mRNA synthesis using appropriate primers and RNA polymerase. The source of the DNA can be, for example, genomic DNA, plasmid DNA, phage DNA, cDNA, synthetic DNA sequence or any other appropriate source of DNA. The desired temple for in vitro transcription is an anti-target CAR described herein. For example, the template for the RNA anti-target CAR comprises an extracellular region comprising a single chain variable domain of an antibody to a tumor associated antigen described herein; a hinge region (e.g., a hinge region described herein), a transmembrane domain (e.g., a transmembrane domain described herein); and a cytoplasmic region that includes an intracellular signaling domain, e.g., an intracellular signaling domain described herein, e.g., comprising the signaling domain of CD3-zeta and the signaling domain of 4-1BB.

[0746] In one embodiment, the DNA to be used for PCR contains an open reading frame. The DNA can be from a naturally occurring DNA sequence from the genome of an organism. In one embodiment, the nucleic acid can include some or all of the 5′ and/or 3′ untranslated regions (UTRs). The nucleic acid can include exons and introns. In one embodiment, the DNA to be used for PCR is a human nucleic acid sequence. In another embodiment, the DNA to be used for PCR is a human nucleic acid sequence including the 5′ and 3′ UTRs. The DNA can alternatively be an artificial DNA sequence that is not normally expressed in a naturally occurring organism. An exemplary artificial DNA sequence is one that contains portions of genes that are ligated together to form an open reading frame that encodes a fusion protein. The portions of DNA that are ligated together can be from a single organism or from more than one organism.

[0747] PCR is used to generate a template for in vitro transcription of mRNA which is used for transfection. Methods for performing PCR are well known in the art. Primers for use in PCR are designed to have regions that are substantially complementary to regions of the DNA to be used as a template for the PCR. “Substantially complementary,” as used herein, refers to sequences of nucleotides where a majority or all of the bases in the primer sequence are complementary, or one or more bases are non-complementary, or mismatched. Substantially complementary sequences are able to anneal or hybridize with the intended DNA target under annealing conditions used for PCR. The primers can be designed to be substantially complementary to any portion of the DNA template. For example, the primers can be designed to amplify the portion of a nucleic acid that is normally transcribed in cells (the open reading frame), including 5′ and 3′ UTRs. The primers can also be designed to amplify a portion of a nucleic acid that encodes a particular domain of interest. In one embodiment, the primers are designed to amplify the coding region of a human cDNA, including all or portions of the 5′ and 3′ UTRs. Primers useful for PCR can be generated by synthetic methods that are well known in the art. “Forward primers” are primers that contain a region of nucleotides that are substantially complementary to nucleotides on the DNA template that are upstream of the DNA sequence that is to be amplified. “Upstream” is used herein to refer to a location 5, to the DNA sequence to be amplified relative to the coding strand. “Reverse primers” are primers that contain a region of nucleotides that are substantially complementary to a double-stranded DNA template that are downstream of the DNA sequence that is to be amplified. “Downstream” is used herein to refer to a location 3′ to the DNA sequence to be amplified relative to the coding strand.

[0748] Any DNA polymerase useful for PCR can be used in the methods disclosed herein. The reagents and polymerase are commercially available from a number of sources.

[0749] Chemical structures with the ability to promote stability and/or translation efficiency may also be used. The RNA preferably has 5′ and 3′ UTRs. In one embodiment, the 5′ UTR is between one and 3000 nucleotides in length. The length of 5′ and 3′ UTR sequences to be added to the coding region can be altered by different methods, including, but not limited to, designing primers for PCR that anneal to different regions of the UTRs. Using this approach, one of ordinary skill in the art can modify the 5′ and 3′ UTR lengths required to achieve optimal translation efficiency following transfection of the transcribed RNA.

[0750] The 5′ and 3′ UTRs can be the naturally occurring, endogenous 5′ and 3′ UTRs for the nucleic acid of interest. Alternatively, UTR sequences that are not endogenous to the nucleic acid of interest can be added by incorporating the UTR sequences into the forward and reverse primers or by any other modifications of the template. The use of UTR sequences that are not endogenous to the nucleic acid of interest can be useful for modifying the stability and/or translation efficiency of the RNA. For example, it is known that AU-rich elements in 3′ UTR sequences can decrease the stability of mRNA. Therefore, 3′ UTRs can be selected or designed to increase the stability of the transcribed RNA based on properties of UTRs that are well known in the art.

[0751] In one embodiment, the 5′ UTR can contain the Kozak sequence of the endogenous nucleic acid. Alternatively, when a 5′ UTR that is not endogenous to the nucleic acid of interest is being added by PCR as described above, a consensus Kozak sequence can be redesigned by adding the 5′ UTR sequence. Kozak sequences can increase the efficiency of translation of some RNA transcripts, but does not appear to be required for all RNAs to enable efficient translation. The requirement for Kozak sequences for many mRNAs is known in the art. In other embodiments the 5′ UTR can be 5′UTR of an RNA virus whose RNA genome is stable in cells. In other embodiments various nucleotide analogues can be used in the 3′ or 5′ UTR to impede exonuclease degradation of the mRNA.

[0752] To enable synthesis of RNA from a DNA template without the need for gene cloning, a promoter of transcription should be attached to the DNA template upstream of the sequence to be transcribed. When a sequence that functions as a promoter for an RNA polymerase is added to the 5′ end of the forward primer, the RNA polymerase promoter becomes incorporated into the PCR product upstream of the open reading frame that is to be transcribed. In one preferred embodiment, the promoter is a T7 polymerase promoter, as described elsewhere herein. Other useful promoters include, but are not limited to, T3 and SP6 RNA polymerase promoters. Consensus nucleotide sequences for T7, T3 and SP6 promoters are known in the art.

[0753] In a preferred embodiment, the mRNA has both a cap on the 5′ end and a 3′ poly (A) tail which determine ribosome binding, initiation of translation and stability mRNA in the cell. On a circular DNA template, for instance, plasmid DNA, RNA polymerase produces a long concatameric product which is not suitable for expression in eukaryotic cells. The transcription of plasmid DNA linearized at the end of the 3′ UTR results in normal sized mRNA which is not effective in eukaryotic transfection even if it is polyadenylated after transcription.

[0754] On a linear DNA template, phage T7 RNA polymerase can extend the 3′ end of the transcript beyond the last base of the template (Schenborn and Mierendorf, Nuc Acids Res., 13:6223-36 (1985); Nacheva and Berzal-Herranz, Eur. J. Biochem., 270:1485-65 (2003).

[0755] The conventional method of integration of polyA/T stretches into a DNA template is molecular cloning. However polyA/T sequence integrated into plasmid DNA can cause plasmid instability, which is why plasmid DNA templates obtained from bacterial cells are often highly contaminated with deletions and other aberrations. This makes cloning procedures not only laborious and time consuming but often not reliable. That is why a method which allows construction of DNA templates with polyA/T 3′ stretch without cloning highly desirable.

[0756] The polyA/T segment of the transcriptional DNA template can be produced during PCR by using a reverse primer containing a polyA/T tail, such as 100T tail (SEQ ID NO: 35) (size can be 50-5000 T (SEQ ID NO: 36)), or after PCR by any other method, including, but not limited to, DNA ligation or in vitro recombination. Poly(A) tails also provide stability to RNAs and reduce their degradation. Generally, the length of a poly(A) tail positively correlates with the stability of the transcribed RNA. In one embodiment, the poly(A) tail is between 100 and 5000 adenosines (SEQ ID NO: 37).

[0757] Poly(A) tails of RNAs can be further extended following in vitro transcription with the use of a poly(A) polymerase, such as E. coli polyA polymerase (E-PAP). In one embodiment, increasing the length of a poly(A) tail from 100 nucleotides to between 300 and 400 nucleotides (SEQ ID NO: 38) results in about a two-fold increase in the translation efficiency of the RNA. Additionally, the attachment of different chemical groups to the 3′ end can increase mRNA stability. Such attachment can contain modified/artificial nucleotides, aptamers and other compounds. For example, ATP analogs can be incorporated into the poly(A) tail using poly(A) polymerase. ATP analogs can further increase the stability of the RNA.

[0758] 5′ caps on also provide stability to RNA molecules. In a preferred embodiment, RNAs produced by the methods disclosed herein include a 5′ cap. The 5′ cap is provided using techniques known in the art and described herein (Cougot, et al., Trends in Biochem. Sci., 29:436-444 (2001); Stepinski, et al., RNA, 7:1468-95 (2001); Elango, et al., Biochim. Biophys. Res. Commun., 330:958-966 (2005)).

[0759] The RNAs produced by the methods disclosed herein can also contain an internal ribosome entry site (IRES) sequence. The IRES sequence may be any viral, chromosomal or artificially designed sequence which initiates cap-independent ribosome binding to mRNA and facilitates the initiation of translation. Any solutes suitable for cell electroporation, which can contain factors facilitating cellular permeability and viability such as sugars, peptides, lipids, proteins, antioxidants, and surfactants can be included.

[0760] RNA can be introduced into target cells using any of a number of different methods, for instance, commercially available methods which include, but are not limited to, electroporation (Amaxa Nucleofector-II (Amaxa Biosystems, Cologne, Germany)), (ECM 830 (BTX) (Harvard Instruments, Boston, Mass.) or the Gene Pulser II (BioRad, Denver, Colo.), Multiporator (Eppendort, Hamburg Germany), cationic liposome mediated transfection using lipofection, polymer encapsulation, peptide mediated transfection, or biolistic particle delivery systems such as “gene guns” (see, for example, Nishikawa, et al. Hum Gene Ther., 12(8):861-70 (2001).

### Non-Viral Delivery Methods

[0761] In some aspects, non-viral methods can be used to deliver a nucleic acid encoding an anti-target CAR described herein into a cell or tissue or a subject.

[0762] In some embodiments, the non-viral method includes the use of a transposon (also called a transposable element). In some embodiments, a transposon is a piece of DNA that can insert itself at a location in a genome, for example, a piece of DNA that is capable of self-replicating and inserting its copy into a genome, or a piece of DNA that can be spliced out of a longer nucleic acid and inserted into another place in a genome. For example, a transposon comprises a DNA sequence made up of inverted repeats flanking genes for transposition.

[0763] Exemplary methods of nucleic acid delivery using a transposon include a Sleeping Beauty transposon system (SBTS) and a piggyBac (PB) transposon system. See, e.g., Aronovich et al. Hum. Mol. Genet. 20.R1(2011):R14-20; Singh et al. Cancer Res. 15(2008):2961-2971; Huang et al. Mol. Ther. 16(2008):580-589; Grabundzija et al. Mol. Ther. 18(2010):1200-1209; Kebriaei et al. Blood. 122.21(2013):166; Williams. Molecular Therapy 16.9(2008):1515-16; Bell et al. Nat. Protoc. 2.12(2007):3153-65; and Ding et al. Cell. 122.3(2005):473-83, all of which are incorporated herein by reference.

[0764] The SBTS includes two components: 1) a transposon containing a transgene and 2) a source of transposase enzyme. The transposase can transpose the transposon from a carrier plasmid (or other donor DNA) to a target DNA, such as a host cell chromosome/genome. For example, the transposase binds to the carrier plasmid/donor DNA, cuts the transposon (including transgene(s)) out of the plasmid, and inserts it into the genome of the host cell. See, e.g., Aronovich et al. supra.

[0765] Exemplary transposons include a pT2-based transposon. See, e.g., Grabundzija et al. Nucleic Acids Res. 41.3(2013):1829-47; and Singh et al. Cancer Res. 68.8(2008): 2961-2971, all of which are incorporated herein by reference. Exemplary transposases include a Tc1/mariner-type transposase, e.g., the SB10 transposase or the SB11 transposase (a hyperactive transposase which can be expressed, e.g., from a cytomegalovirus promoter). See, e.g., Aronovich et al.; Kebriaei et al.; and Grabundzija et al., all of which are incorporated herein by reference.

[0766] Use of the SBTS permits efficient integration and expression of a transgene, e.g., a nucleic acid encoding an anti-target CAR described herein. Provided herein are methods of generating a cell, e.g., T cell or NK cell, that stably expresses an anti-target CAR described herein, e.g., using a transposon system such as SBTS.

[0767] In accordance with methods described herein, in some embodiments, one or more nucleic acids, e.g., plasmids, containing the SBTS components are delivered to a cell (e.g., T or NK cell). For example, the nucleic acid(s) are delivered by standard methods of nucleic acid (e.g., plasmid DNA) delivery, e.g., methods described herein, e.g., electroporation, transfection, or lipofection. In some embodiments, the nucleic acid contains a transposon comprising a transgene, e.g., a nucleic acid encoding an anti-target CAR described herein. In some embodiments, the nucleic acid contains a transposon comprising a transgene (e.g., a nucleic acid encoding an anti-target CAR described herein) as well as a nucleic acid sequence encoding a transposase enzyme. In other embodiments, a system with two nucleic acids is provided, e.g., a dual-plasmid system, e.g., where a first plasmid contains a transposon comprising a transgene, and a second plasmid contains a nucleic acid sequence encoding a transposase enzyme. For example, the first and the second nucleic acids are co-delivered into a host cell.

[0768] In some embodiments, cells, e.g., T or NK cells, are generated that express an anti-target CAR described herein by using a combination of gene insertion using the SBTS and genetic editing using a nuclease (e.g., Zinc finger nucleases (ZFNs), Transcription Activator-Like Effector Nucleases (TALENs), the CRISPR/Cas system, or engineered meganuclease re-engineered homing endonucleases).

[0769] In some embodiments, use of a non-viral method of delivery permits reprogramming of cells, e.g., T or NK cells, and direct infusion of the cells into a subject. Advantages of non-viral vectors include but are not limited to the ease and relatively low cost of producing sufficient amounts required to meet a patient population, stability during storage, and lack of immunogenicity.

### Nucleic Acid Constructs Encoding an Anti-Target CAR

[0770] The present invention also provides nucleic acid molecules encoding one or more anti-target CAR constructs described herein. In one aspect, the nucleic acid molecule is provided as a messenger RNA transcript. In one aspect, the nucleic acid molecule is provided as a DNA construct.

[0771] Accordingly, in one aspect, the invention pertains to a nucleic acid molecule encoding an anti-target (CAR), wherein the anti-target CAR comprises a ligand that binds to a target CAR described herein, a transmembrane domain (e.g., a transmembrane domain described herein), and an intracellular signaling domain (e.g., an intracellular signaling domain described herein) comprising a stimulatory domain, e.g., a costimulatory signaling domain (e.g., a costimulatory signaling domain described herein) and/or a primary signaling domain (e.g., a primary signaling domain described herein, e.g., a zeta chain described herein). In one embodiment, the transmembrane domain is transmembrane domain of a protein selected from the group consisting of the alpha, beta or zeta chain of the T-cell receptor, CD28, CD3 epsilon, CD45, CD4, CDS, CD8, CD9, CD16, CD22, CD33, CD37, CD64, CD80, CD86, CD134, CD137 and CD154. In some embodiments, a transmembrane domain may include at least the transmembrane region(s) of, e.g., KIRDS2, OX40, CD2, CD27, LFA-1 (CD11a, CD18), ICOS (CD278), 4-1BB (CD137), GITR, CD40, BAFFR, HVEM (LIGHTR), SLAMF7, NKp80 (KLRF1), NKp44, NKp30, NKp46, CD160, CD19, IL2R beta, IL2R gamma, IL7R α, ITGA1, VLA1, CD49a, ITGA4, IA4, CD49D, ITGA6, VLA-6, CD49f, ITGAD, CD11d, ITGAE, CD103, ITGAL, CD11a, LFA-1, ITGAM, CD11b, ITGAX, CD11c, ITGB1, CD29, ITGB2, CD18, LFA-1, ITGB7, NKG2D, NKG2C, TNFR2, DNAM1 (CD226), SLAMF4 (CD244, 2B4), CD84, CD96 (Tactile), CEACAM1, CRTAM, Ly9 (CD229), CD160 (BY55), PSGL1, CD100 (SEMA4D), SLAMF6 (NTB-A, Ly108), SLAM (SLAMF1, CD150, IPO-3), BLAME (SLAMF8), SELPLG (CD162), LTBR, PAG/Cbp.

[0772] In one embodiment, the transmembrane domain comprises a sequence of SEQ ID NO: 12, or a sequence with 95-99% identity thereof. In one embodiment, the antigen binding domain is connected to the transmembrane domain by a hinge region, e.g., a hinge described herein. In one embodiment, the hinge region comprises SEQ ID NO:403 or SEQ ID NO:405 or SEQ ID NO:407 or SEQ ID NO:10, or a sequence with 95-99% identity thereof. In one embodiment, the isolated nucleic acid molecule further comprises a sequence encoding a costimulatory domain. In one embodiment, the costimulatory domain is a functional signaling domain of a protein selected from the group consisting of OX40, CD27, CD28, CDS, ICAM-1, LFA-1 (CD11a/CD18), ICOS (CD278), and 4-1BB (CD137). Further examples of such costimulatory molecules include CDS, ICAM-1, GITR, BAFFR, HVEM (LIGHTR), SLAMF7, NKp80 (KLRF1), NKp44, NKp30, NKp46, CD160, CD19, CD4, CD8alpha, CD8beta, IL2R beta, IL2R gamma, IL7R alpha, ITGA4, VLA1, CD49a, ITGA4, IA4, CD49D, ITGA6, VLA-6, CD49f, ITGAD, CD11d, ITGAE, CD103, ITGAL, CD11a, LFA-1, ITGAM, CD11b, ITGAX, CD11c, ITGB1, CD29, ITGB2, CD18, LFA-1, ITGB7, NKG2D, NKG2C, TNFR2, TRANCE/RANKL, DNAM1 (CD226), SLAMF4 (CD244, 2B4), CD84, CD96 (Tactile), CEACAM1, CRTAM, Ly9 (CD229), CD160 (BY55), PSGL1, CD100 (SEMA4D), CD69, SLAMF6 (NTB-A, Ly108), SLAM (SLAMF1, CD150, IPO-3), BLAME (SLAMF8), SELPLG (CD162), LTBR, LAT, GADS, SLP-76, and PAG/Cbp. In one embodiment, the costimulatory domain comprises a sequence of SEQ ID NOs:14, or a sequence with 95-99% identity thereof. In one embodiment, the intracellular signaling domain comprises a functional signaling domain of 4-1BB and a functional signaling domain of CD3 zeta. In one embodiment, the intracellular signaling domain comprises the sequence of any one of SEQ ID NOs: 14, or a sequence with 95-99% identity thereof, and the sequence of SEQ ID NO: 18 or SEQ ID NO:20, or a sequence with 95-99% identity thereof, wherein the sequences comprising the intracellular signaling domain are expressed in the same frame and as a single polypeptide chain.

[0773] In another aspect, the invention pertains to an isolated nucleic acid molecule encoding an anti-target CAR construct comprising a leader sequence of SEQ ID NO: 401, a ligand as described herein, a hinge region of SEQ ID NO:403 or SEQ ID NO:405 or SEQ ID NO:407 or SEQ ID NO:10 (or a sequence with 95-99% identity thereof), a transmembrane domain having a sequence of SEQ ID NO: 12 (or a sequence with 95-99% identity thereof), a 4-1BB costimulatory domain having a sequence of SEQ ID NOs:14 (or a sequence with 95-99% identity thereof), and a CD3 zeta stimulatory domain having a sequence of SEQ ID NO:18 or SEQ ID NO:20 (or a sequence with 95-99% identity thereof).

[0774] In another aspect, the invention pertains to a nucleic acid molecule encoding an anti-target CAR molecule that comprises a ligand that binds to a target CAR, e.g., a ligand comprising a cognate antigen or antibody molecule, e.g., an anti-idiotypic antibody molecule that binds to a target CAR. In an embodiment, the anti-idiotypic antibody comprises the antibody of clone 136.20.1, as disclosed herein and in International Application WO 2014/190273, the entire contents of which are hereby incorporated by reference.

[0775] In one embodiment, the encoded anti-target CAR molecule further comprises a sequence encoding a costimulatory domain. In one embodiment, the costimulatory domain is a functional signaling domain of a protein selected from the group consisting of OX40, CD27, CD28, CDS, ICAM-1, LFA-1 (CD11a/CD18) and 4-1BB (CD137). In one embodiment, the costimulatory domain comprises a sequence of SEQ ID NO: 14. In one embodiment, the transmembrane domain is a transmembrane domain of a protein selected from the group consisting of the alpha, beta or zeta chain of the T-cell receptor, CD28, CD3 epsilon, CD45, CD4, CD5, CD8, CD9, CD16, CD22, CD33, CD37, CD64, CD80, CD86, CD134, CD137 and CD154. In one embodiment, the transmembrane domain comprises a sequence of SEQ ID NO:12. In one embodiment, the intracellular signaling domain comprises a functional signaling domain of 4-1BB and a functional signaling domain of zeta. In one embodiment, the intracellular signaling domain comprises a sequence of SEQ ID NO: 14 and the sequence of SEQ ID NO: 18, wherein the sequences comprising the intracellular signaling domain are expressed in the same frame and as a single polypeptide chain. In one embodiment, the anti-target CAR ligand as described herein is connected to the transmembrane domain by a hinge region. In one embodiment, the hinge region comprises SEQ ID NO:403. In one embodiment, the hinge region comprises SEQ ID NO:405 or SEQ ID NO:407 or SEQ ID NO:10.

[0776] The nucleic acid sequences coding for the desired molecules can be obtained using recombinant methods known in the art, such as, for example by screening libraries from cells expressing the gene, by deriving the gene from a vector known to include the same, or by isolating directly from cells and tissues containing the same, using standard techniques. Alternatively, the gene of interest can be produced synthetically, rather than cloned.

[0777] The present invention also provides vectors in which a DNA of the present invention is inserted. Vectors derived from retroviruses such as the lentivirus are suitable tools to achieve long-term gene transfer since they allow long-term, stable integration of a transgene and its propagation in daughter cells. Lentiviral vectors have the added advantage over vectors derived from onco-retroviruses such as murine leukemia viruses in that they can transduce non-proliferating cells, such as hepatocytes. They also have the added advantage of low immunogenicity. A retroviral vector may also be, e.g., a gammaretroviral vector. A gammaretroviral vector may include, e.g., a promoter, a packaging signal (ψ), a primer binding site (PBS), one or more (e.g., two) long terminal repeats (LTR), and a transgene of interest, e.g., a gene encoding an anti-target CAR. A gammaretroviral vector may lack viral structural gens such as gag, pol, and env. Exemplary gammaretroviral vectors include Murine Leukemia Virus (MLV), Spleen-Focus Forming Virus (SFFV), and Myeloproliferative Sarcoma Virus (MPSV), and vectors derived therefrom. Other gammaretroviral vectors are described, e.g., in Tobias Maetzig et al., “Gammaretroviral Vectors: Biology, Technology and Application” Viruses. 2011 June; 3(6): 677-713.

[0778] In another embodiment, the vector comprising the nucleic acid encoding the desired anti-target CAR of the invention is an adenoviral vector (A5/35). In another embodiment, the expression of nucleic acids encoding anti-target CARs can be accomplished using of transposons such as sleeping beauty, crisper, CAS9, and zinc finger nucleases. See below June et al. 2009Nature Reviews Immunology 9.10: 704-716, is incorporated herein by reference.

[0779] In brief summary, the expression of natural or synthetic nucleic acids encoding anti-target CARs is typically achieved by operably linking a nucleic acid encoding the anti-target CAR polypeptide or portions thereof to a promoter, and incorporating the construct into an expression vector. The vectors can be suitable for replication and integration eukaryotes. Typical cloning vectors contain transcription and translation terminators, initiation sequences, and promoters useful for regulation of the expression of the desired nucleic acid sequence.

[0780] The expression constructs of the present invention may also be used for nucleic acid immunization and gene therapy, using standard gene delivery protocols. Methods for gene delivery are known in the art. See, e.g., U.S. Pat. Nos. 5,399,346, 5,580,859, 5,589,466, incorporated by reference herein in their entireties. In another embodiment, the invention provides a gene therapy vector.

[0781] The nucleic acid can be cloned into a number of types of vectors. For example, the nucleic acid can be cloned into a vector including, but not limited to a plasmid, a phagemid, a phage derivative, an animal virus, and a cosmid. Vectors of particular interest include expression vectors, replication vectors, probe generation vectors, and sequencing vectors.

[0782] Further, the expression vector may be provided to a cell in the form of a viral vector. Viral vector technology is well known in the art and is described, for example, in Sambrook et al., 2012, MOLECULAR CLONING: A LABORATORY MANUAL, volumes 1-4, Cold Spring Harbor Press, NY), and in other virology and molecular biology manuals. Viruses, which are useful as vectors include, but are not limited to, retroviruses, adenoviruses, adeno-associated viruses, herpes viruses, and lentiviruses. In general, a suitable vector contains an origin of replication functional in at least one organism, a promoter sequence, convenient restriction endonuclease sites, and one or more selectable markers, (e.g., WO 01/96584; WO 01/29058; and U.S. Pat. No. 6,326,193).

[0783] A number of viral based systems have been developed for gene transfer into mammalian cells. For example, retroviruses provide a convenient platform for gene delivery systems. A selected gene can be inserted into a vector and packaged in retroviral particles using techniques known in the art. The recombinant virus can then be isolated and delivered to cells of the subject either in vivo or ex vivo. A number of retroviral systems are known in the art. In some embodiments, adenovirus vectors are used. A number of adenovirus vectors are known in the art. In one embodiment, lentivirus vectors are used.

[0784] Additional promoter elements, e.g., enhancers, regulate the frequency of transcriptional initiation. Typically, these are located in the region 30-110 bp upstream of the start site, although a number of promoters have been shown to contain functional elements downstream of the start site as well. The spacing between promoter elements frequently is flexible, so that promoter function is preserved when elements are inverted or moved relative to one another. In the thymidine kinase (tk) promoter, the spacing between promoter elements can be increased to 50 bp apart before activity begins to decline. Depending on the promoter, it appears that individual elements can function either cooperatively or independently to activate transcription. Exemplary promoters include the CMV IE gene, EF-1α, ubiquitin C, or phosphoglycerokinase (PGK) promoters.

[0785] An example of a promoter that is capable of expressing an anti-target CAR encoding nucleic acid molecule in a mammalian T cell is the EF1a promoter. The native EF1a promoter drives expression of the alpha subunit of the elongation factor-1 complex, which is responsible for the enzymatic delivery of aminoacyl tRNAs to the ribosome. The EF1a promoter has been extensively used in mammalian expression plasmids and has been shown to be effective in driving anti-target CAR expression from nucleic acid molecules cloned into a lentiviral vector. See, e.g., Milone et al., Mol. Ther. 17(8): 1453-1464 (2009). In one aspect, the EF1a promoter comprises the sequence provided as SEQ ID NO:400.

[0786] Another example of a promoter is the immediate early cytomegalovirus (CMV) promoter sequence. This promoter sequence is a strong constitutive promoter sequence capable of driving high levels of expression of any polynucleotide sequence operatively linked thereto. However, other constitutive promoter sequences may also be used, including, but not limited to the simian virus 40 (SV40) early promoter, mouse mammary tumor virus (MMTV), human immunodeficiency virus (HIV) long terminal repeat (LTR) promoter, MoMuLV promoter, an avian leukemia virus promoter, an Epstein-Barr virus immediate early promoter, a Rous sarcoma virus promoter, as well as human gene promoters such as, but not limited to, the actin promoter, the myosin promoter, the elongation factor-1a promoter, the hemoglobin promoter, and the creatine kinase promoter. Further, the invention should not be limited to the use of constitutive promoters. Inducible promoters are also contemplated as part of the invention. The use of an inducible promoter provides a molecular switch capable of turning on expression of the polynucleotide sequence which it is operatively linked when such expression is desired, or turning off the expression when expression is not desired. Examples of inducible promoters include, but are not limited to a metallothionine promoter, a glucocorticoid promoter, a progesterone promoter, and a tetracycline promoter.

[0787] A vector may also include, e.g., a signal sequence to facilitate secretion, a polyadenylation signal and transcription terminator (e.g., from Bovine Growth Hormone (BGH) gene), an element allowing episomal replication and replication in prokaryotes (e.g. SV40 origin and ColE1 or others known in the art) and/or elements to allow selection (e.g., ampicillin resistance gene and/or zeocin marker).

[0788] In order to assess the expression of an anti-target CAR polypeptide or portions thereof, the expression vector to be introduced into a cell can also contain either a selectable marker gene or a reporter gene or both to facilitate identification and selection of expressing cells from the population of cells sought to be transfected or infected through viral vectors. In other aspects, the selectable marker may be carried on a separate piece of DNA and used in a co-transfection procedure. Both selectable markers and reporter genes may be flanked with appropriate regulatory sequences to enable expression in the host cells. Useful selectable markers include, for example, antibiotic-resistance genes, such as neo and the like.

[0789] Reporter genes are used for identifying potentially transfected cells and for evaluating the functionality of regulatory sequences. In general, a reporter gene is a gene that is not present in or expressed by the recipient organism or tissue and that encodes a polypeptide whose expression is manifested by some easily detectable property, e.g., enzymatic activity. Expression of the reporter gene is assayed at a suitable time after the DNA has been introduced into the recipient cells. Suitable reporter genes may include genes encoding luciferase, beta-galactosidase, chloramphenicol acetyl transferase, secreted alkaline phosphatase, or the green fluorescent protein gene (e.g., Ui-Tei et al., 2000 FEBS Letters 479: 79-82). Suitable expression systems are well known and may be prepared using known techniques or obtained commercially. In general, the construct with the minimal 5′ flanking region showing the highest level of expression of reporter gene is identified as the promoter. Such promoter regions may be linked to a reporter gene and used to evaluate agents for the ability to modulate promoter-driven transcription.

[0790] Methods of introducing and expressing genes into a cell are known in the art. In the context of an expression vector, the vector can be readily introduced into a host cell, e.g., mammalian, bacterial, yeast, or insect cell by any method in the art. For example, the expression vector can be transferred into a host cell by physical, chemical, or biological means.

[0791] Physical methods for introducing a polynucleotide into a host cell include calcium phosphate precipitation, lipofection, particle bombardment, microinjection, electroporation, and the like. Methods for producing cells comprising vectors and/or exogenous nucleic acids are well-known in the art. See, for example, Sambrook et al., 2012, MOLECULAR CLONING: A LABORATORY MANUAL, volumes 1-4, Cold Spring Harbor Press, NY). A preferred method for the introduction of a polynucleotide into a host cell is calcium phosphate transfection

[0792] Biological methods for introducing a polynucleotide of interest into a host cell include the use of DNA and RNA vectors. Viral vectors, and especially retroviral vectors, have become the most widely used method for inserting genes into mammalian, e.g., human cells. Other viral vectors can be derived from lentivirus, poxviruses, herpes simplex virus I, adenoviruses and adeno-associated viruses, and the like. See, for example, U.S. Pat. Nos. 5,350,674 and 5,585,362.

[0793] Chemical means for introducing a polynucleotide into a host cell include colloidal dispersion systems, such as macromolecule complexes, nanocapsules, microspheres, beads, and lipid-based systems including oil-in-water emulsions, micelles, mixed micelles, and liposomes. An exemplary colloidal system for use as a delivery vehicle in vitro and in vivo is a liposome (e.g., an artificial membrane vesicle). Other methods of state-of-the-art targeted delivery of nucleic acids are available, such as delivery of polynucleotides with targeted nanoparticles or other suitable sub-micron sized delivery system.

[0794] In the case where a non-viral delivery system is utilized, an exemplary delivery vehicle is a liposome. The use of lipid formulations is contemplated for the introduction of the nucleic acids into a host cell (in vitro, ex vivo or in vivo). In another aspect, the nucleic acid may be associated with a lipid. The nucleic acid associated with a lipid may be encapsulated in the aqueous interior of a liposome, interspersed within the lipid bilayer of a liposome, attached to a liposome via a linking molecule that is associated with both the liposome and the oligonucleotide, entrapped in a liposome, complexed with a liposome, dispersed in a solution containing a lipid, mixed with a lipid, combined with a lipid, contained as a suspension in a lipid, contained or complexed with a micelle, or otherwise associated with a lipid. Lipid, lipid/DNA or lipid/expression vector associated compositions are not limited to any particular structure in solution. For example, they may be present in a bilayer structure, as micelles, or with a “collapsed” structure. They may also simply be interspersed in a solution, possibly forming aggregates that are not uniform in size or shape. Lipids are fatty substances which may be naturally occurring or synthetic lipids. For example, lipids include the fatty droplets that naturally occur in the cytoplasm as well as the class of compounds which contain long-chain aliphatic hydrocarbons and their derivatives, such as fatty acids, alcohols, amines, amino alcohols, and aldehydes.

[0795] Lipids suitable for use can be obtained from commercial sources. For example, dimyristyl phosphatidylcholine (“DMPC”) can be obtained from Sigma, St. Louis, Mo.; dicetyl phosphate (“DCP”) can be obtained from K & K Laboratories (Plainview, N.Y.); cholesterol (“Choi”) can be obtained from Calbiochem-Behring; dimyristyl phosphatidylglycerol (“DMPG”) and other lipids may be obtained from Avanti Polar Lipids, Inc. (Birmingham, Ala.). Stock solutions of lipids in chloroform or chloroform/methanol can be stored at about −20° C. Chloroform is used as the only solvent since it is more readily evaporated than methanol. “Liposome” is a generic term encompassing a variety of single and multilamellar lipid vehicles formed by the generation of enclosed lipid bilayers or aggregates. Liposomes can be characterized as having vesicular structures with a phospholipid bilayer membrane and an inner aqueous medium. Multilamellar liposomes have multiple lipid layers separated by aqueous medium. They form spontaneously when phospholipids are suspended in an excess of aqueous solution. The lipid components undergo self-rearrangement before the formation of closed structures and entrap water and dissolved solutes between the lipid bilayers (Ghosh et al., 1991 Glycobiology 5: 505-10). However, compositions that have different structures in solution than the normal vesicular structure are also encompassed. For example, the lipids may assume a micellar structure or merely exist as nonuniform aggregates of lipid molecules. Also contemplated are lipofectamine-nucleic acid complexes.

[0796] Regardless of the method used to introduce exogenous nucleic acids into a host cell or otherwise expose a cell to the inhibitor of the present invention, in order to confirm the presence of the recombinant DNA sequence in the host cell, a variety of assays may be performed. Such assays include, for example, “molecular biological” assays well known to those of skill in the art, such as Southern and Northern blotting, RT-PCR and PCR; “biochemical” assays, such as detecting the presence or absence of a particular peptide, e.g., by immunological means (ELISAs and Western blots) or by assays described herein to identify agents falling within the scope of the invention.

[0797] The present invention further provides a vector comprising an anti-target CAR encoding nucleic acid molecule. In one aspect, an anti-target CAR vector can be directly transduced into a cell, e.g., a T cell or a NK cell. In one aspect, the vector is a cloning or expression vector, e.g., a vector including, but not limited to, one or more plasmids (e.g., expression plasmids, cloning vectors, minicircles, minivectors, double minute chromosomes), retroviral and lentiviral vector constructs. In one aspect, the vector is capable of expressing the anti-target CAR construct in mammalian immune effector cells (e.g., T cells, NK cells). In one aspect, the mammalian T cell is a human T cell. In one aspect, the mammalian NK cell is a human NK cell.

### Sources of Cells

[0798] Prior to expansion and genetic modification or other modification, a source of cells, e.g., T cells or natural killer (NK) cells, can be obtained from a subject. The term “subject” is intended to include living organisms in which an immune response can be elicited (e.g., mammals). Examples of subjects include humans, monkeys, chimpanzees, dogs, cats, mice, rats, and transgenic species thereof. T cells can be obtained from a number of sources, including peripheral blood mononuclear cells, bone marrow, lymph node tissue, cord blood, thymus tissue, tissue from a site of infection, ascites, pleural effusion, spleen tissue, and tumors.

[0799] In certain aspects of the present disclosure, immune effector cells, e.g., T cells, can be obtained from a unit of blood collected from a subject using any number of techniques known to the skilled artisan, such as Ficoll™ separation. In one preferred aspect, cells from the circulating blood of an individual are obtained by apheresis. The apheresis product typically contains lymphocytes, including T cells, monocytes, granulocytes, B cells, other nucleated white blood cells, red blood cells, and platelets. In one aspect, the cells collected by apheresis may be washed to remove the plasma fraction and, optionally, to place the cells in an appropriate buffer or media for subsequent processing steps. In one embodiment, the cells are washed with phosphate buffered saline (PBS). In an alternative embodiment, the wash solution lacks calcium and may lack magnesium or may lack many if not all divalent cations.

[0800] Initial activation steps in the absence of calcium can lead to magnified activation. As those of ordinary skill in the art would readily appreciate a washing step may be accomplished by methods known to those in the art, such as by using a semi-automated “flow-through” centrifuge (for example, the Cobe 2991 cell processor, the Baxter CytoMate, or the Haemonetics Cell Saver 5) according to the manufacturer's instructions. After washing, the cells may be resuspended in a variety of biocompatible buffers, such as, for example, Ca-free, Mg-free PBS, PlasmaLyte A, or other saline solution with or without buffer. Alternatively, the undesirable components of the apheresis sample may be removed and the cells directly resuspended in culture media.

[0801] It is recognized that the methods of the application can utilize culture media conditions comprising 5% or less, for example 2%, human AB serum, and employ known culture media conditions and compositions, for example those described in Smith et al., “Ex vivo expansion of human T cells for adoptive immunotherapy using the novel Xeno-free CTS Immune Cell Serum Replacement” Clinical & Translational Immunology (2015) 4, e31; doi:10.1038/cti.2014.31.

[0802] In one aspect, T cells are isolated from peripheral blood lymphocytes by lysing the red blood cells and depleting the monocytes, for example, by centrifugation through a PERCOLL™ gradient or by counterflow centrifugal elutriation.

[0803] The methods described herein can include, e.g., selection of a specific subpopulation of immune effector cells, e.g., T cells, that are a T regulatory cell-depleted population, CD25+ depleted cells, using, e.g., a negative selection technique, e.g., described herein. Preferably, the population of T regulatory depleted cells contains less than 30%, 25%, 20%, 15%, 10%, 5%, 4%, 3%, 2%, 1% of CD25+ cells.

[0804] In one embodiment, T regulatory cells, e.g., CD25+ T cells, are removed from the population using an anti-CD25 antibody, or fragment thereof, or a CD25-binding ligand, IL-2. In one embodiment, the anti-CD25 antibody, or fragment thereof, or CD25-binding ligand is conjugated to a substrate, e.g., a bead, or is otherwise coated on a substrate, e.g., a bead. In one embodiment, the anti-CD25 antibody, or fragment thereof, is conjugated to a substrate as described herein.

[0805] In one embodiment, the T regulatory cells, e.g., CD25+ T cells, are removed from the population using CD25 depletion reagent from Miltenyi™. In one embodiment, the ratio of cells to CD25 depletion reagent is 1e7 cells to 20 uL, or 1e7 cells to 15 uL, or 1e7 cells to 10 uL, or 1e7 cells to 5 uL, or 1e7 cells to 2.5 uL, or 1e7 cells to 1.25 uL. In one embodiment, e.g., for T regulatory cells, e.g., CD25+ depletion, greater than 500 million cells/ml is used. In a further aspect, a concentration of cells of 600, 700, 800, or 900 million cells/ml is used.

[0806] In one embodiment, the population of immune effector cells to be depleted includes about 6×10⁹ CD25+ T cells. In other aspects, the population of immune effector cells to be depleted include about 1×10⁹ to 1×10¹⁰ CD25+ T cell, and any integer value in between. In one embodiment, the resulting population T regulatory depleted cells has 2×10⁹ T regulatory cells, e.g., CD25+ cells, or less (e.g., 1×10⁹, 5×10⁸, 1×10⁸, 5×10⁷, 1×10⁷, or less CD25+ cells).

[0807] In one embodiment, the T regulatory cells, e.g., CD25+ cells, are removed from the population using the CliniMAC system with a depletion tubing set, such as, e.g., tubing 162-01. In one embodiment, the CliniMAC system is run on a depletion setting such as, e.g., DEPLETION2.1.

[0808] Without wishing to be bound by a particular theory, decreasing the level of negative regulators of immune cells (e.g., decreasing the number of unwanted immune cells, e.g., T_{REG} cells), in a subject prior to apheresis or during manufacturing of a CAR-expressing cell product can reduce the risk of subject relapse. For example, methods of depleting T_{REG} cells are known in the art. Methods of decreasing T_{REG} cells include, but are not limited to, cyclophosphamide, anti-GITR antibody (an anti-GITR antibody described herein), CD25-depletion, and combinations thereof.

[0809] In some embodiments, the manufacturing methods comprise reducing the number of (e.g., depleting) T_{REG} cells prior to manufacturing of the anti-target CAR-expressing cell. For example, manufacturing methods comprise contacting the sample, e.g., the apheresis sample, with an anti-GITR antibody and/or an anti-CD25 antibody (or fragment thereof, or a CD25-binding ligand), e.g., to deplete T_{REG} cells prior to manufacturing of the anti-target CAR-expressing cell (e.g., T cell, NK cell) product.

[0810] In an embodiment, a subject is pre-treated with one or more therapies that reduce T_{REG} cells prior to collection of cells for anti-target CAR-expressing cell product manufacturing, thereby reducing the risk of subject relapse to anti-target CAR-expressing cell treatment. In an embodiment, methods of decreasing T_{REG} cells include, but are not limited to, administration to the subject of one or more of cyclophosphamide, anti-GITR antibody, CD25-depletion, or a combination thereof. Administration of one or more of cyclophosphamide, anti-GITR antibody, CD25-depletion, or a combination thereof, can occur before, during or after an infusion of the anti-target CAR-expressing cell product.

[0811] In an embodiment, a subject is pre-treated with cyclophosphamide prior to collection of cells for anti-target CAR-expressing cell product manufacturing, thereby reducing the risk of subject relapse to CAR-expressing cell treatment. In an embodiment, a subject is pre treated with an anti-GITR antibody prior to collection of cells for anti-target CAR-expressing cell product manufacturing, thereby reducing the risk of subject relapse to anti-target CAR-expressing cell treatment.

[0812] In one embodiment, the population of cells to be removed are neither the regulatory T cells or tumor cells, but cells that otherwise negatively affect the expansion and/or function of CART cells, e.g. cells expressing CD14, CD11b, CD33, CD15, or other markers expressed by potentially immune suppressive cells. In one embodiment, such cells are envisioned to be removed concurrently with regulatory T cells and/or tumor cells, or following said depletion, or in another order.

[0813] The methods described herein can include more than one selection step, e.g., more than one depletion step. Enrichment of a T cell population by negative selection can be accomplished, e.g., with a combination of antibodies directed to surface markers unique to the negatively selected cells. One method is cell sorting and/or selection via negative magnetic immunoadherence or flow cytometry that uses a cocktail of monoclonal antibodies directed to cell surface markers present on the cells negatively selected. For example, to enrich for CD4+ cells by negative selection, a monoclonal antibody cocktail can include antibodies to CD14, CD20, CD11b, CD16, HLA-DR, and CD8.

[0814] The methods described herein can further include removing cells from the population which express a tumor antigen, e.g., a tumor antigen that does not comprise CD25, e.g., CD19, CD30, CD38, CD123, CD20, CD14 or CD11b, to thereby provide a population of T regulatory depleted, e.g., CD25+ depleted, and tumor antigen depleted cells that are suitable for expression of a CAR, e.g., a CAR described herein. In one embodiment, tumor antigen expressing cells are removed simultaneously with the T regulatory, e.g., CD25+ cells. For example, an anti-CD25 antibody, or fragment thereof, and an anti-tumor antigen antibody, or fragment thereof, can be attached to the same substrate, e.g., bead, which can be used to remove the cells or an anti-CD25 antibody, or fragment thereof, or the anti-tumor antigen antibody, or fragment thereof, can be attached to separate beads, a mixture of which can be used to remove the cells. In other embodiments, the removal of T regulatory cells, e.g., CD25+ cells, and the removal of the tumor antigen expressing cells is sequential, and can occur, e.g., in either order.

[0815] Also provided are methods that include removing cells from the population which express a check point inhibitor, e.g., a check point inhibitor described herein, e.g., one or more of PD1+ cells, LAG3+ cells, and TIM3+ cells, to thereby provide a population of T regulatory depleted, e.g., CD25+ depleted cells, and check point inhibitor depleted cells, e.g., PD1+, LAG3+ and/or TIM3+ depleted cells. Exemplary check point inhibitors include B7-H1, B7-1, CD160, P1H, 2B4, PD1, TIM3, CEACAM (e.g., CEACAM-1, CEACAM-3 and/or CEACAM-5), LAG3, TIGIT, CTLA-4, BTLA and LAIR1. In one embodiment, check point inhibitor expressing cells are removed simultaneously with the T regulatory, e.g., CD25+ cells. For example, an anti-CD25 antibody, or fragment thereof, and an anti-check point inhibitor antibody, or fragment thereof, can be attached to the same bead which can be used to remove the cells, or an anti-CD25 antibody, or fragment thereof, and the anti-check point inhibitor antibody, or fragment there, can be attached to separate beads, a mixture of which can be used to remove the cells. In other embodiments, the removal of T regulatory cells, e.g., CD25+ cells, and the removal of the check point inhibitor expressing cells is sequential, and can occur, e.g., in either order.

[0816] Methods described herein can include a positive selection step. For example, T cells can isolated by incubation with anti-CD3/anti-CD28 (e.g., 3×28)-conjugated beads, such as DYNABEADS® M-450 CD3/CD28 T, for a time period sufficient for positive selection of the desired T cells. In one embodiment, the time period is about 30 minutes. In a further embodiment, the time period ranges from 30 minutes to 36 hours or longer and all integer values there between. In a further embodiment, the time period is at least 1, 2, 3, 4, 5, or 6 hours. In yet another embodiment, the time period is 10 to 24 hours, e.g., 24 hours. Longer incubation times may be used to isolate T cells in any situation where there are few T cells as compared to other cell types, such in isolating tumor infiltrating lymphocytes (TIL) from tumor tissue or from immunocompromised individuals. Further, use of longer incubation times can increase the efficiency of capture of CD8+ T cells. Thus, by simply shortening or lengthening the time T cells are allowed to bind to the CD3/CD28 beads and/or by increasing or decreasing the ratio of beads to T cells (as described further herein), subpopulations of T cells can be preferentially selected for or against at culture initiation or at other time points during the process. Additionally, by increasing or decreasing the ratio of anti-CD3 and/or anti-CD28 antibodies on the beads or other surface, subpopulations of T cells can be preferentially selected for or against at culture initiation or at other desired time points.

[0817] In one embodiment, a T cell population can be selected that expresses one or more of IFN-γ, TNFα, IL-17A, IL-2, IL-3, IL-4, GM-CSF, IL-10, IL-13, granzyme B, and perforin, or other appropriate molecules, e.g., other cytokines. Methods for screening for cell expression can be determined, e.g., by the methods described in PCT Publication No.: WO 2013/126712.

[0818] For isolation of a desired population of cells by positive or negative selection, the concentration of cells and surface (e.g., particles such as beads) can be varied. In certain aspects, it may be desirable to significantly decrease the volume in which beads and cells are mixed together (e.g., increase the concentration of cells), to ensure maximum contact of cells and beads. For example, in one aspect, a concentration of 10 billion cells/ml, 9 billion/ml, 8 billion/ml, 7 billion/ml, 6 billion/ml, or 5 billion/ml is used. In one aspect, a concentration of 1 billion cells/ml is used. In yet one aspect, a concentration of cells from 75, 80, 85, 90, 95, or 100 million cells/ml is used. In further aspects, concentrations of 125 or 150 million cells/ml can be used.

[0819] Using high concentrations can result in increased cell yield, cell activation, and cell expansion. Further, use of high cell concentrations allows more efficient capture of cells that may weakly express target antigens of interest, such as CD28-negative T cells, or from samples where there are many tumor cells present (e.g., leukemic blood, tumor tissue, etc.). Such populations of cells may have therapeutic value and would be desirable to obtain. For example, using high concentration of cells allows more efficient selection of CD8+ T cells that normally have weaker CD28 expression.

[0820] In a related aspect, it may be desirable to use lower concentrations of cells. By significantly diluting the mixture of T cells and surface (e.g., particles such as beads), interactions between the particles and cells is minimized. This selects for cells that express high amounts of desired antigens to be bound to the particles. For example, CD4+ T cells express higher levels of CD28 and are more efficiently captured than CD8+ T cells in dilute concentrations. In one aspect, the concentration of cells used is 5×10⁶/ml. In other aspects, the concentration used can be from about 1×10⁵/ml to 1×10⁶/ml, and any integer value in between.

[0821] In other aspects, the cells may be incubated on a rotator for varying lengths of time at varying speeds at either 2-10° C. or at room temperature.

[0822] T cells for stimulation can also be frozen after a washing step. Wishing not to be bound by theory, the freeze and subsequent thaw step provides a more uniform product by removing granulocytes and to some extent monocytes in the cell population. After the washing step that removes plasma and platelets, the cells may be suspended in a freezing solution. While many freezing solutions and parameters are known in the art and will be useful in this context, one method involves using PBS containing 20% DMSO and 8% human serum albumin, or culture media containing 10% Dextran 40 and 5% Dextrose, 20% Human Serum Albumin and 7.5% DMSO, or 31.25% Plasmalyte-A, 31.25% Dextrose 5%, 0.45% NaCl, 10% Dextran 40 and 5% Dextrose, 20% Human Serum Albumin, and 7.5% DMSO or other suitable cell freezing media containing for example, Hespan and PlasmaLyte A, the cells then are frozen to −80° C. at a rate of 1° per minute and stored in the vapor phase of a liquid nitrogen storage tank. Other methods of controlled freezing may be used as well as uncontrolled freezing immediately at −20° C. or in liquid nitrogen.

[0823] In certain aspects, cryopreserved cells are thawed and washed as described herein and allowed to rest for one hour at room temperature prior to activation using the methods of the present invention.

[0824] Also contemplated in the context of the invention is the collection of blood samples or apheresis product from a subject at a time period prior to when the expanded cells as described herein might be needed. As such, the source of the cells to be expanded can be collected at any time point necessary, and desired cells, such as T cells, isolated and frozen for later use in immune effector cell therapy for any number of diseases or conditions that would benefit from immune effector cell therapy, such as those described herein. In one aspect a blood sample or an apheresis is taken from a generally healthy subject. In certain aspects, a blood sample or an apheresis is taken from a generally healthy subject who is at risk of developing a disease, but who has not yet developed a disease, and the cells of interest are isolated and frozen for later use. In certain aspects, the T cells may be expanded, frozen, and used at a later time. In certain aspects, samples are collected from a patient shortly after diagnosis of a particular disease as described herein but prior to any treatments. In a further aspect, the cells are isolated from a blood sample or an apheresis from a subject prior to any number of relevant treatment modalities, including but not limited to treatment with agents such as natalizumab, efalizumab, antiviral agents, chemotherapy, radiation, immunosuppressive agents, such as cyclosporin, azathioprine, methotrexate, mycophenolate, and FK506, antibodies, or other immunoablative agents such as CAMPATH, anti-CD3 antibodies, cytoxan, fludarabine, cyclosporin, FK506, rapamycin, mycophenolic acid, steroids, FR901228, and irradiation.

[0825] In a further aspect of the present invention, T cells are obtained from a patient directly following treatment that leaves the subject with functional T cells. In this regard, it has been observed that following certain cancer treatments, in particular treatments with drugs that damage the immune system, shortly after treatment during the period when patients would normally be recovering from the treatment, the quality of T cells obtained may be optimal or improved for their ability to expand ex vivo. Likewise, following ex vivo manipulation using the methods described herein, these cells may be in a preferred state for enhanced engraftment and in vivo expansion. Thus, it is contemplated within the context of the present invention to collect blood cells, including T cells, dendritic cells, or other cells of the hematopoietic lineage, during this recovery phase. Further, in certain aspects, mobilization (for example, mobilization with GM-CSF) and conditioning regimens can be used to create a condition in a subject wherein repopulation, recirculation, regeneration, and/or expansion of particular cell types is favored, especially during a defined window of time following therapy. Illustrative cell types include T cells, B cells, dendritic cells, and other cells of the immune system.

[0826] In one embodiment, the immune effector cells expressing an anti-target CAR molecule, e.g., an anti-target CAR molecule described herein, are obtained from a subject that has received a low, immune enhancing dose of an mTOR inhibitor. In an embodiment, the population of immune effector cells, e.g., T cells, to be engineered to express an anti-target CAR, are harvested after a sufficient time, or after sufficient dosing of the low, immune enhancing, dose of an mTOR inhibitor, such that the level of PD1 negative immune effector cells, e.g., T cells, or the ratio of PD1 negative immune effector cells, e.g., T cells/PD1 positive immune effector cells, e.g., T cells, in the subject or harvested from the subject has been, at least transiently, increased.

[0827] In other embodiments, population of immune effector cells, e.g., T cells, which have, or will be engineered to express an anti-target CAR, can be treated ex vivo by contact with an amount of an mTOR inhibitor that increases the number of PD1 negative immune effector cells, e.g., T cells or increases the ratio of PD1 negative immune effector cells, e.g., T cells/PD1 positive immune effector cells, e.g., T cells.

[0828] In one embodiment, a T cell population is diacylglycerol kinase (DGK)-deficient. DGK-deficient cells include cells that do not express DGK RNA or protein, or have reduced or inhibited DGK activity. DGK-deficient cells can be generated by genetic approaches, e.g., administering RNA-interfering agents, e.g., siRNA, shRNA, miRNA, to reduce or prevent DGK expression. Alternatively, DGK-deficient cells can be generated by treatment with DGK inhibitors described herein.

[0829] In one embodiment, a T cell population is Ikaros-deficient. Ikaros-deficient cells include cells that do not express Ikaros RNA or protein, or have reduced or inhibited Ikaros activity, Ikaros-deficient cells can be generated by genetic approaches, e.g., administering RNA-interfering agents, e.g., siRNA, shRNA, miRNA, to reduce or prevent Ikaros expression. Alternatively, Ikaros-deficient cells can be generated by treatment with Ikaros inhibitors, e.g., lenalidomide.

[0830] In embodiments, a T cell population is DGK-deficient and Ikaros-deficient, e.g., does not express DGK and Ikaros, or has reduced or inhibited DGK and Ikaros activity. Such DGK and Ikaros-deficient cells can be generated by any of the methods described herein.

[0831] In an embodiment, the NK cells are obtained from the subject. In another embodiment, the NK cells are an NK cell line, e.g., NK-92 cell line (Conkwest).

### Allogeneic CAR

[0832] In embodiments described herein, the immune effector cell can be an allogeneic immune effector cell, e.g., T cell or NK cell. For example, the cell can be an allogeneic T cell, e.g., an allogeneic T cell lacking expression of a functional T cell receptor (TCR) and/or human leukocyte antigen (HLA), e.g., HLA class I and/or HLA class II.

[0833] A T cell lacking a functional TCR can be, e.g., engineered such that it does not express any functional TCR on its surface, engineered such that it does not express one or more subunits that comprise a functional TCR or engineered such that it produces very little functional TCR on its surface. Alternatively, the T cell can express a substantially impaired TCR, e.g., by expression of mutated or truncated forms of one or more of the subunits of the TCR. The term “substantially impaired TCR” means that this TCR will not elicit an adverse immune reaction in a host.

[0834] A T cell described herein can be, e.g., engineered such that it does not express a functional HLA on its surface. For example, a T cell described herein, can be engineered such that cell surface expression HLA, e.g., HLA class 1 and/or HLA class II, is downregulated.

[0835] In some embodiments, the T cell can lack a functional TCR and a functional HLA, e.g., HLA class I and/or HLA class II.

[0836] Modified T cells that lack expression of a functional TCR and/or HLA can be obtained by any suitable means, including a knock out or knock down of one or more subunit of TCR or HLA. For example, the T cell can include a knock down of TCR and/or HLA using siRNA, shRNA, clustered regularly interspaced short palindromic repeats (CRISPR) transcription-activator like effector nuclease (TALEN), or zinc finger endonuclease (ZFN).

[0837] In some embodiments, the allogeneic cell can be a cell which does not express or expresses at low levels an inhibitory molecule, e.g. by any method described herein. For example, the cell can be a cell that does not express or expresses at low levels an inhibitory molecule, e.g., that can decrease the ability of an anti-target CAR-expressing cell to mount an immune effector response. Examples of inhibitory molecules include PD1, PD-L1, CTLA4, TIM3, CEACAM (e.g., CEACAM-1, CEACAM-3 and/or CEACAM-5), LAG3, VISTA, BTLA, TIGIT, LAIR1, CD160, 2B4 and TGF beta. Inhibition of an inhibitory molecule, e.g., by inhibition at the DNA, RNA or protein level, can optimize a CAR-expressing cell performance. In embodiments, an inhibitory nucleic acid, e.g., an inhibitory nucleic acid, e.g., a dsRNA, e.g., an siRNA or shRNA, a clustered regularly interspaced short palindromic repeats (CRISPR), a transcription-activator like effector nuclease (TALEN), or a zinc finger endonuclease (ZFN), e.g., as described herein, can be used.

siRNA and shRNA to Inhibit TCR or HLA

[0838] In some embodiments, TCR expression and/or HLA expression can be inhibited using siRNA or shRNA that targets a nucleic acid encoding a TCR and/or HLA in a T cell.

[0839] Expression of siRNA and shRNAs in T cells can be achieved using any conventional expression system, e.g., such as a lentiviral expression system.

[0840] Exemplary shRNAs that downregulate expression of components of the TCR are described, e.g., in US Publication No.: 2012/0321667. Exemplary siRNA and shRNA that downregulate expression of HLA class I and/or HLA class II genes are described, e.g., in U.S. publication No.: US 2007/0036773.

CRISPR to inhibit TCR or HLA

[0841] “CRISPR” or “CRISPR to TCR and/or HLA” or “CRISPR to inhibit TCR and/or HLA” as used herein refers to a set of clustered regularly interspaced short palindromic repeats, or a system comprising such a set of repeats. “Cas”, as used herein, refers to a CRISPR-associated protein. A “CRISPR/Cas” system refers to a system derived from CRISPR and Cas which can be used to silence or mutate a TCR and/or HLA gene.

[0842] Naturally-occurring CRISPR/Cas systems are found in approximately 40% of sequenced eubacteria genomes and 90% of sequenced archaea. Grissa et al. (2007) BMC Bioinformatics 8: 172. This system is a type of prokaryotic immune system that confers resistance to foreign genetic elements such as plasmids and phages and provides a form of acquired immunity. Barrangou et al. (2007) Science 315: 1709-1712; Marragini et al. (2008) Science 322: 1843-1845.

[0843] The CRISPR/Cas system has been modified for use in gene editing (silencing, enhancing or changing specific genes) in eukaryotes such as mice or primates. Wiedenheft et al. (2012) Nature 482: 331-8. This is accomplished by introducing into the eukaryotic cell a plasmid containing a specifically designed CRISPR and one or more appropriate Cas.

[0844] The CRISPR sequence, sometimes called a CRISPR locus, comprises alternating repeats and spacers. In a naturally-occurring CRISPR, the spacers usually comprise sequences foreign to the bacterium such as a plasmid or phage sequence; in the TCR and/or HLA CRISPR/Cas system, the spacers are derived from the TCR or HLA gene sequence.

[0845] RNA from the CRISPR locus is constitutively expressed and processed by Cas proteins into small RNAs. These comprise a spacer flanked by a repeat sequence. The RNAs guide other Cas proteins to silence exogenous genetic elements at the RNA or DNA level. Horvath et al. (2010) Science 327: 167-170; Makarova et al. (2006) Biology Direct 1: 7. The spacers thus serve as templates for RNA molecules, analogously to siRNAs. Pennisi (2013) Science 341: 833-836.

[0846] As these naturally occur in many different types of bacteria, the exact arrangements of the CRISPR and structure, function and number of Cas genes and their product differ somewhat from species to species. Haft et al. (2005) PLoS Comput. Biol. 1: e60; Kunin et al. (2007) Genome Biol. 8: R61; Mojica et al. (2005) J. Mol. Evol. 60: 174-182; Bolotin et al. (2005) Microbiol. 151: 2551-2561; Pourcel et al. (2005) Microbiol. 151: 653-663; and Stern et al. (2010) Trends. Genet. 28: 335-340. For example, the Cse (Cas subtype, E. coli) proteins (e.g., CasA) form a functional complex, Cascade, that processes CRISPR RNA transcripts into spacer-repeat units that Cascade retains. Brouns et al. (2008) Science 321: 960-964. In other prokaryotes, Cas6 processes the CRISPR transcript. The CRISPR-based phage inactivation in E. coli requires Cascade and Cas3, but not Cas1 or Cas2. The Cmr (Cas RAMP module) proteins in Pyrococcus furiosus and other prokaryotes form a functional complex with small CRISPR RNAs that recognizes and cleaves complementary target RNAs. A simpler CRISPR system relies on the protein Cas9, which is a nuclease with two active cutting sites, one for each strand of the double helix. Combining Cas9 and modified CRISPR locus RNA can be used in a system for gene editing. Pennisi (2013) Science 341: 833-836.

[0847] The CRISPR/Cas system can thus be used to edit a TCR and/or HLA gene (adding or deleting a basepair), or introducing a premature stop which thus decreases expression of a TCR and/or HLA. The CRISPR/Cas system can alternatively be used like RNA interference, turning off TCR and/or HLA gene in a reversible fashion. In a mammalian cell, for example, the RNA can guide the Cas protein to a TCR and/or HLA promoter, sterically blocking RNA polymerases.

[0848] Artificial CRISPR/Cas systems can be generated which inhibit TCR and/or HLA, using technology known in the art, e.g., that described in U.S. Publication No. 20140068797, and Cong (2013) Science 339: 819-823. Other artificial CRISPR/Cas systems that are known in the art may also be generated which inhibit TCR and/or HLA, e.g., that described in Tsai (2014) Nature Biotechnol., 32:6 569-576, U.S. Pat. Nos. 8,871,445; 8,865,406; 8,795,965; 8,771,945; and U.S. Pat. No. 8,697,359.

TALEN to Inhibit TCR and/or HLA

[0849] “TALEN” or “TALEN to HLA and/or TCR” or “TALEN to inhibit HLA and/or TCR” refers to a transcription activator-like effector nuclease, an artificial nuclease which can be used to edit the HLA and/or TCR gene.

[0850] TALENs are produced artificially by fusing a TAL effector DNA binding domain to a DNA cleavage domain. Transcription activator-like effects (TALEs) can be engineered to bind any desired DNA sequence, including a portion of the HLA or TCR gene. By combining an engineered TALE with a DNA cleavage domain, a restriction enzyme can be produced which is specific to any desired DNA sequence, including a HLA or TCR sequence. These can then be introduced into a cell, wherein they can be used for genome editing. Boch (2011) Nature Biotech. 29: 135-6; and Boch et al. (2009) Science 326: 1509-12; Moscou et al. (2009) Science 326: 3501.

[0851] TALEs are proteins secreted by Xanthomonas bacteria. The DNA binding domain contains a repeated, highly conserved 33-34 amino acid sequence, with the exception of the 12th and 13th amino acids. These two positions are highly variable, showing a strong correlation with specific nucleotide recognition. They can thus be engineered to bind to a desired DNA sequence.

[0852] To produce a TALEN, a TALE protein is fused to a nuclease (N), which is a wild-type or mutated Fold endonuclease. Several mutations to FokI have been made for its use in TALENs; these, for example, improve cleavage specificity or activity. Cermak et al. (2011) Nucl. Acids Res. 39: e82; Miller et al. (2011) Nature Biotech. 29: 143-8; Hockemeyer et al. (2011) Nature Biotech. 29: 731-734; Wood et al. (2011) Science 333: 307; Doyon et al. (2010) Nature Methods 8: 74-79; Szczepek et al. (2007) Nature Biotech. 25: 786-793; and Guo et al. (2010) J. Mol. Biol. 200: 96.

[0853] The FokI domain functions as a dimer, requiring two constructs with unique DNA binding domains for sites in the target genome with proper orientation and spacing. Both the number of amino acid residues between the TALE DNA binding domain and the FokI cleavage domain and the number of bases between the two individual TALEN binding sites appear to be important parameters for achieving high levels of activity. Miller et al. (2011) Nature Biotech. 29: 143-8.

[0854] A HLA or TCR TALEN can be used inside a cell to produce a double-stranded break (DSB). A mutation can be introduced at the break site if the repair mechanisms improperly repair the break via non-homologous end joining. For example, improper repair may introduce a frame shift mutation. Alternatively, foreign DNA can be introduced into the cell along with the TALEN; depending on the sequences of the foreign DNA and chromosomal sequence, this process can be used to correct a defect in the HLA or TCR gene or introduce such a defect into a wt HLA or TCR gene, thus decreasing expression of HLA or TCR.

[0855] TALENs specific to sequences in HLA or TCR can be constructed using any method known in the art, including various schemes using modular components. Zhang et al. (2011) Nature Biotech. 29: 149-53; Geibler et al. (2011) PLoS ONE 6: e19509.

Zinc Finger Nuclease to Inhibit HLA and/or TCR

[0856] “ZFN” or “Zinc Finger Nuclease” or “ZFN to HLA and/or TCR” or “ZFN to inhibit HLA and/or TCR” refer to a zinc finger nuclease, an artificial nuclease which can be used to edit the HLA and/or TCR gene.

[0857] Like a TALEN, a ZFN comprises a Fold nuclease domain (or derivative thereof) fused to a DNA-binding domain. In the case of a ZFN, the DNA-binding domain comprises one or more zinc fingers. Carroll et al. (2011) Genetics Society of America 188: 773-782; and Kim et al. (1996) Proc. Natl. Acad. Sci. USA 93: 1156-1160.

[0858] A zinc finger is a small protein structural motif stabilized by one or more zinc ions. A zinc finger can comprise, for example, Cys2His2, and can recognize an approximately 3-bp sequence. Various zinc fingers of known specificity can be combined to produce multi-finger polypeptides which recognize about 6, 9, 12, 15 or 18-bp sequences. Various selection and modular assembly techniques are available to generate zinc fingers (and combinations thereof) recognizing specific sequences, including phage display, yeast one-hybrid systems, bacterial one-hybrid and two-hybrid systems, and mammalian cells.

[0859] Like a TALEN, a ZFN must dimerize to cleave DNA. Thus, a pair of ZFNs are required to target non-palindromic DNA sites. The two individual ZFNs must bind opposite strands of the DNA with their nucleases properly spaced apart. Bitinaite et al. (1998) Proc. Natl. Acad. Sci. USA 95: 10570-5.

[0860] Also like a TALEN, a ZFN can create a double-stranded break in the DNA, which can create a frame-shift mutation if improperly repaired, leading to a decrease in the expression and amount of HLA and/or TCR in a cell. ZFNs can also be used with homologous recombination to mutate in the HLA or TCR gene.

[0861] ZFNs specific to sequences in HLA AND/OR TCR can be constructed using any method known in the art. See, e.g., Provasi (2011) Nature Med. 18: 807-815; Torikai (2013) Blood 122: 1341-1349; Cathomen et al. (2008) Mol. Ther. 16: 1200-7; Guo et al. (2010) J. Mol. Biol. 400: 96; U.S. Patent Publication 2011/0158957; and U.S. Patent Publication 2012/0060230.

### Telomerase Expression

[0862] While not wishing to be bound by any particular theory, in some embodiments, a therapeutic T cell has short term persistence in a patient, due to shortened telomeres in the T cell; accordingly, transfection with a telomerase gene can lengthen the telomeres of the T cell and improve persistence of the T cell in the patient. See Carl June, “Adoptive T cell therapy for cancer in the clinic”, Journal of Clinical Investigation, 117:1466-1476 (2007). Thus, in an embodiment, an immune effector cell, e.g., a T cell, ectopically expresses a telomerase subunit, e.g., the catalytic subunit of telomerase, e.g., TERT, e.g., hTERT. In some aspects, this disclosure provides a method of producing an anti-target CAR-expressing cell, comprising contacting a cell with a nucleic acid encoding a telomerase subunit, e.g., the catalytic subunit of telomerase, e.g., TERT, e.g., hTERT. The cell may be contacted with the nucleic acid before, simultaneous with, or after being contacted with a construct encoding an anti-target CAR.

[0863] In one aspect, the disclosure features a method of making a population of immune effector cells (e.g., T cells, NK cells). In an embodiment, the method comprises: providing a population of immune effector cells (e.g., T cells or NK cells), contacting the population of immune effector cells with a nucleic acid encoding a CAR; and contacting the population of immune effector cells with a nucleic acid encoding a telomerase subunit, e.g., hTERT, under conditions that allow for anti-target CAR and telomerase expression.

[0864] In an embodiment, the nucleic acid encoding the telomerase subunit is DNA. In an embodiment, the nucleic acid encoding the telomerase subunit comprises a promoter capable of driving expression of the telomerase subunit.

[0865] In an embodiment, hTERT has the amino acid sequence of GenBank Protein ID AAC51724.1 (Meyerson et al., “hEST2, the Putative Human Telomerase Catalytic Subunit Gene, Is Up-Regulated in Tumor Cells and during Immortalization” Cell Volume 90, Issue 4, Aug. 22, 1997, Pages 785-795) as follows:

(SEQ ID NO: 61)
[sequence omitted]

[0866] In an embodiment, the hTERT has a sequence at least 80%, 85%, 90%, 95%, 96\hat{ }, 97%, 98%, or 99% identical to the sequence of SEQ ID NO: 61. In an embodiment, the hTERT has a sequence of SEQ ID NO: 61. In an embodiment, the hTERT comprises a deletion (e.g., of no more than 5, 10, 15, 20, or 30 amino acids) at the N-terminus, the C-terminus, or both. In an embodiment, the hTERT comprises a transgenic amino acid sequence (e.g., of no more than 5, 10, 15, 20, or 30 amino acids) at the N-terminus, the C-terminus, or both.

[0867] In an embodiment, the hTERT is encoded by the nucleic acid sequence of GenBank Accession No. AF018167 (Meyerson et al., “hEST2, the Putative Human Telomerase Catalytic Subunit Gene, Is Up-Regulated in Tumor Cells and during Immortalization” Cell Volume 90, Issue 4, Aug. 22, 1997, Pages 785-795):

(SEQ ID NO: 62)

| | |
|---|---|
| 1 | caggcagcgt ggtcctgctg cgcacgtggg aagccctggc |
| | cccggccacc cccgcgatgc |
| 61 | cgcgcgctcc ccgctgccga gccgtgcgct ccctgctgcg |
| | cagccactac cgcgaggtgc |
| 121 | tgccgctggc cacgttcgtg cggcgcctgg ggccccaggg |
| | ctggcggctg gtgcagcgcg |
| 181 | gggacccggc ggctttccgc gcgctggtgg cccagtgcct |
| | ggtgtgcgtg ccctgggacg |
| 241 | cacggccgcc ccccgccgcc ccctccttcc gccaggtgtc |
| | ctgcctgaag gagctggtgg |
| 301 | cccgagtgct gcagaggctg tgcgagcgcg gcgcgaagaa |
| | cgtgctggcc ttcggcttcg |
| 361 | cgctgctgga cggggcccgc gggggccccc ccgaggcctt |
| | caccaccagc gtgcgcagct |
| 421 | acctgcccaa cacggtgacc gacgcactgc gggggagcgg |
| | ggcgtggggg ctgctgttgc |
| 481 | gccgcgtggg cgacgacgtg ctggttcacc tgctggcacg |
| | ctgcgcgctc tttgtgctgg |
| 541 | tggctcccag ctgcgcctac caggtgtgcg ggccgccgct |
| | gtaccagctc ggcgctgcca |
| 601 | ctcaggcccg gcccccgcca cacgctagtg gaccccgaag |
| | gcgtctggga tgcgaacggg |
| 661 | cctggaacca tagcgtcagg gaggccgggg tccccctggg |
| | cctgccagcc ccgggtgcga |
| 721 | ggaggcgcgg gggcagtgcc agccgaagtc tgccgttgcc |
| | caagaggccc aggcgtggcg |
| 781 | ctgcccctga gccggagcgg acgcccgttg ggcaggggtc |
| | ctgggcccac ccgggcagga |
| 841 | cgcgtggacc gagtgaccgt ggtttctgtg tggtgtcacc |
| | tgccagaccc gccgaagaag |
| 901 | ccacctcttt ggagggtgcg ctctctggca cgcgccactc |
| | ccacccatcc gtgggccgcc |
| 961 | agcaccacgc gggcccccca tccacatcgc ggccaccacg |
| | tccctgggac acgccttgtc |
| 1021 | ccccggtgta cgccgagacc aagcacttcc tctactcctc |
| | aggcgacaag gagcagctgc |
| 1081 | ggccctcctt cctactcagc tctctgaggc ccagcctgac |
| | tggcgctcgg aggctcgtgg |
| 1141 | agaccatctt tctgggttcc aggccctgga tgccagggac |
| | tccccgcagg ttgccccgcc |
| 1201 | tgccccagcg ctactggcaa atgcggcccc tgtttctgga |
| | gctgcttggg aaccacgcgc |
| 1261 | agtgccccta cggggtgctc ctcaagacgc actgcccgct |
| | gcgagctgcg gtcaccccag |
| 1321 | cagccggtgt ctgtgcccgg gagaagcccc agggctctgt |
| | ggcggccccc gaggaggagg |
| 1381 | acacagaccc ccgtcgcctg gtgcagctgc tccgccagca |
| | cagcagcccc tggcaggtgt |
| 1441 | acggcttcgt gcgggcctgc ctgcgccggc tggtgccccc |
| | aggcctctgg ggctccaggc |
| 1501 | acaacgaacg ccgcttcctc aggaacacca agaagttcat |
| | ctccctgggg aagcatgcca |
| 1561 | agctctcgct gcaggagctg acgtggaaga tgagcgtgcg |
| | gggctgcgct tggctgcgca |
| 1621 | ggagcccagg ggttggctgt gttccggccg cagagcaccg |
| | tctgcgtgag gagatcctgg |
| 1681 | ccaagttcct gcactggctg atgagtgtgt acgtcgtcga |
| | gctgctcagg tctttctttt |
| 1741 | atgtcacgga gaccacgttt caaaagaaca ggctcttttt |
| | ctaccggaag agtgtctgga |
| 1801 | gcaagttgca aagcattgga atcagacagc acttgaagag |
| | ggtgcagctg cgggagctgt |
| 1861 | cggaagcaga ggtcaggcag catcgggaag ccaggcccgc |
| | cctgctgacg tccagactcc |
| 1921 | gcttcatccc caagcctgac gggctgcggc cgattgtgaa |
| | catggactac gtcgtgggag |
| 1981 | ccagaacgtt ccgcagagaa aagagggccg agcgtctcac |
| | ctcgagggtg aaggcactgt |
| 2041 | tcagcgtgct caactacgag cgggcgcggc gccccggcct |
| | cctgggcgcc tctgtgctgg |
| 2101 | gcctggacga tatccacagg gcctggcgca ccttcgtgct |
| | gcgtgtgcgg gcccaggacc |
| 2161 | cgccgcctga gctgtacttt gtcaaggtgg atgtgacggg |
| | cgcgtacgac accatccccc |
| 2221 | aggacaggct cacggaggtc atcgccagca tcatcaaacc |
| | ccagaacacg tactgcgtgc |
| 2281 | gtcggtatgc cgtggtccag aaggccgccc atgggcacgt |
| | ccgcaaggcc ttcaagagcc |
| 2341 | acgtctctac cttgacagac ctccagccgt acatgcgaca |
| | gttcgtggct cacctgcagg |
| 2401 | agaccagccc gctgagggat gccgtcgtca tcgagcagag |
| | ctcctccctg aatgaggcca |
| 2461 | gcagtggcct cttcgacgtc ttcctacgct tcatgtgcca |
| | ccacgccgtg cgcatcaggg |
| 2521 | gcaagtccta cgtccagtgc caggggatcc cgcagggctc |
| | catcctctcc acgctgctct |
| 2581 | gcagcctgtg ctacggcgac atggagaaca agctgtttgc |
| | ggggattcgg cgggacgggc |
| 2641 | tgctcctgcg tttggtggat gatttcttgt tggtgacacc |
| | tcacctcacc cacgcgaaaa |
| 2701 | ccttcctcag gaccctggtc cgaggtgtcc ctgagtatgg |
| | ctgcgtggtg aacttgcgga |
| 2761 | agacagtggt gaacttccct gtagaagacg aggccctggg |
| | tggcacggct tttgttcaga |
| 2821 | tgccggccca cggcctattc ccctggtgcg gcctgctgct |
| | ggatacccgg accctggagg |
| 2881 | tgcagagcga ctactccagc tatgcccgga cctccatcag |
| | agccagtctc accttcaacc |
| 2941 | gcggcttcaa ggctgggagg aacatgcgtc gcaaactctt |
| | tggggtcttg cggctgaagt |
| 3001 | gtcacagcct gtttctggat ttgcaggtga acagcctcca |
| | gacggtgtgc accaacatct |
| 3061 | acaagatcct cctgctgcag gcgtacaggt ttcacgcatg |
| | tgtgctgcag ctcccatttc |
| 3121 | atcagcaagt ttggaagaac cccacatttt tcctgcgcgt |
| | catctctgac acggcctccc |
| 3181 | tctgctactc catcctgaaa gccaagaacg cagggatgtc |
| | gctgggggcc aagggcgccg |
| 3241 | ccggccctct gccctccgag gccgtgcagt ggctgtgcca |
| | ccaagcattc ctgctcaagc |
| 3301 | tgactcgaca ccgtgtcacc tacgtgccac tcctggggtc |
| | actcaggaca gcccagacgc |
| 3361 | agctgagtcg gaagctcccg gggacgacgc tgactgccct |
| | ggaggccgca gccaacccgg |
| 3421 | cactgccctc agacttcaag accatcctgg actgatggcc |
| | acccgcccac agccaggccg |
| 3481 | agagcagaca ccagcagccc tgtcacgccg ggctctacgt |
| | cccagggagg gaggggcggc |
| 3541 | ccacacccag gcccgcaccg ctgggagtct gaggcctgag |
| | tgagtgtttg gccgaggcct |
| 3601 | gcatgtccgg ctgaaggctg agtgtccggc tgaggcctga |
| | gcgagtgtcc agccaagggc |
| 3661 | tgagtgtcca gcacacctgc cgtcttcact tccccacagg |
| | ctggcgctcg gctccacccc |
| 3721 | agggccagct tttcctcacc aggagcccgg cttccactcc |
| | ccacatagga atagtccatc |
| 3781 | cccagattcg ccattgttca cccctcgccc tgccctcctt |
| | tgccttccac ccccaccatc |
| 3841 | caggtggaga ccctgagaag gaccctggga gctctgggaa |
| | tttggagtga ccaaaggtgt |
| 3901 | gccctgtaca caggcgagga ccctgcacct ggatgggggt |
| | ccctgtgggt caaattgggg |
| 3961 | ggaggtgctg tgggagtaaa atactgaata tatgagtttt |
| | tcagttttga aaaaaaaaaa |
| 4021 | aaaaaaa |

[0868] In an embodiment, the hTERT is encoded by a nucleic acid having a sequence at least 80%, 85%, 90%, 95%, 96, 97%, 98%, or 99% identical to the sequence of SEQ ID NO: 62. In an embodiment, the hTERT is encoded by a nucleic acid of SEQ ID NO: 62.

### Activation and Expansion of Immune Effector Cells (e.g., T Cells)

[0869] Immune effector cells such as T cells may be activated and expanded generally using methods as described, for example, in U.S. Pat. Nos. 6,352,694; 6,534,055; 6,905,680; 6,692,964; 5,858,358; 6,887,466; 6,905,681; 7,144,575; 7,067,318; 7,172,869; 7,232,566; 7,175,843; 5,883,223; 6,905,874; 6,797,514; 6,867,041; and U.S. Patent Application Publication No. 20060121005.

[0870] As demonstrated by the data disclosed herein, expanding the T cells by the methods disclosed herein can multiply the cells by about 10 fold, 20 fold, 30 fold, 40 fold, 50 fold, 60 fold, 70 fold, 80 fold, 90 fold, 100 fold, 200 fold, 300 fold, 400 fold, 500 fold, 600 fold, 700 fold, 800 fold, 900 fold, 1000 fold, 2000 fold, 3000 fold, 4000 fold, 5000 fold, 6000 fold, 7000 fold, 8000 fold, 9000 fold, 10,000 fold, 100,000 fold, 1,000,000 fold, 10,000,000 fold, or greater, and any and all whole or partial intergers therebetween. In one embodiment, the T cells expand in the range of about 20 fold to about 50 fold.

[0871] Generally, a population of immune effector cells e.g., T regulatory cell depleted cells, may be expanded by contact with a surface having attached thereto an agent that stimulates a CD3/TCR complex associated signal and a ligand that stimulates a costimulatory molecule on the surface of the T cells. In particular, T cell populations may be stimulated as described herein, such as by contact with an anti-CD3 antibody, or antigen-binding fragment thereof, or an anti-CD2 antibody immobilized on a surface, or by contact with a protein kinase C activator (e.g., bryostatin) in conjunction with a calcium ionophore. For co-stimulation of an accessory molecule on the surface of the T cells, a ligand that binds the accessory molecule is used. For example, a population of T cells can be contacted with an anti-CD3 antibody and an anti-CD28 antibody, under conditions appropriate for stimulating proliferation of the T cells. To stimulate proliferation of either CD4+ T cells or CD8+ T cells, an anti-CD3 antibody and an anti-CD28 antibody can be used. Examples of an anti-CD28 antibody include 9.3, B-T3, XR-CD28 (Diaclone, Besançon, France) can be used as can other methods commonly known in the art (Berg et al., Transplant Proc. 30(8):3975-3977, 1998; Haanen et al., J. Exp. Med. 190(9):13191328, 1999; Garland et al., J. Immunol Meth. 227(1-2):53-63, 1999).

[0872] In certain aspects, the primary stimulatory signal and the costimulatory signal for the T cell may be provided by different protocols. For example, the agents providing each signal may be in solution or coupled to a surface. When coupled to a surface, the agents may be coupled to the same surface (i.e., in “cis” formation) or to separate surfaces (i.e., in “trans” formation). Alternatively, one agent may be coupled to a surface and the other agent in solution. In one aspect, the agent providing the costimulatory signal is bound to a cell surface and the agent providing the primary activation signal is in solution or coupled to a surface. In certain aspects, both agents can be in solution. In one aspect, the agents may be in soluble form, and then cross-linked to a surface, such as a cell expressing Fc receptors or an antibody or other binding agent which will bind to the agents. In this regard, see for example, U.S. Patent Application Publication Nos. 20040101519 and 20060034810 for artificial antigen presenting cells (aAPCs) that are contemplated for use in activating and expanding T cells in the present invention.

[0873] In one aspect, the two agents are immobilized on beads, either on the same bead, i.e., “cis,” or to separate beads, i.e., “trans.” By way of example, the agent providing the primary activation signal is an anti-CD3 antibody or an antigen-binding fragment thereof and the agent providing the costimulatory signal is an anti-CD28 antibody or antigen-binding fragment thereof; and both agents are co-immobilized to the same bead in equivalent molecular amounts. In one aspect, a 1:1 ratio of each antibody bound to the beads for CD4+ T cell expansion and T cell growth is used. In certain aspects of the present invention, a ratio of anti CD3:CD28 antibodies bound to the beads is used such that an increase in T cell expansion is observed as compared to the expansion observed using a ratio of 1:1. In one particular aspect an increase of from about 1 to about 3 fold is observed as compared to the expansion observed using a ratio of 1:1. In one aspect, the ratio of CD3:CD28 antibody bound to the beads ranges from 100:1 to 1:100 and all integer values there between. In one aspect, more anti-CD28 antibody is bound to the particles than anti-CD3 antibody, i.e., the ratio of CD3:CD28 is less than one. In certain aspects, the ratio of anti CD28 antibody to anti CD3 antibody bound to the beads is greater than 2:1. In one particular aspect, a 1:100 CD3:CD28 ratio of antibody bound to beads is used. In one aspect, a 1:75 CD3:CD28 ratio of antibody bound to beads is used. In a further aspect, a 1:50 CD3:CD28 ratio of antibody bound to beads is used. In one aspect, a 1:30 CD3:CD28 ratio of antibody bound to beads is used. In one preferred aspect, a 1:10 CD3:CD28 ratio of antibody bound to beads is used. In one aspect, a 1:3 CD3:CD28 ratio of antibody bound to the beads is used. In yet one aspect, a 3:1 CD3:CD28 ratio of antibody bound to the beads is used.

[0874] Ratios of particles to cells from 1:500 to 500:1 and any integer values in between may be used to stimulate T cells or other target cells. As those of ordinary skill in the art can readily appreciate, the ratio of particles to cells may depend on particle size relative to the target cell. For example, small sized beads could only bind a few cells, while larger beads could bind many. In certain aspects the ratio of cells to particles ranges from 1:100 to 100:1 and any integer values in-between and in further aspects the ratio comprises 1:9 to 9:1 and any integer values in between, can also be used to stimulate T cells. The ratio of anti-CD3- and anti-CD28-coupled particles to T cells that result in T cell stimulation can vary as noted above, however certain preferred values include 1:100, 1:50, 1:40, 1:30, 1:20, 1:10, 1:9, 1:8, 1:7, 1:6, 1:5, 1:4, 1:3, 1:2, 1:1, 2:1, 3:1, 4:1, 5:1, 6:1, 7:1, 8:1, 9:1, 10:1, and 15:1 with one preferred ratio being at least 1:1 particles per T cell. In one aspect, a ratio of particles to cells of 1:1 or less is used. In one particular aspect, a preferred particle: cell ratio is 1:5. In further aspects, the ratio of particles to cells can be varied depending on the day of stimulation. For example, in one aspect, the ratio of particles to cells is from 1:1 to 10:1 on the first day and additional particles are added to the cells every day or every other day thereafter for up to 10 days, at final ratios of from 1:1 to 1:10 (based on cell counts on the day of addition). In one particular aspect, the ratio of particles to cells is 1:1 on the first day of stimulation and adjusted to 1:5 on the third and fifth days of stimulation. In one aspect, particles are added on a daily or every other day basis to a final ratio of 1:1 on the first day, and 1:5 on the third and fifth days of stimulation. In one aspect, the ratio of particles to cells is 2:1 on the first day of stimulation and adjusted to 1:10 on the third and fifth days of stimulation. In one aspect, particles are added on a daily or every other day basis to a final ratio of 1:1 on the first day, and 1:10 on the third and fifth days of stimulation. One of skill in the art will appreciate that a variety of other ratios may be suitable for use in the present invention. In particular, ratios will vary depending on particle size and on cell size and type. In one aspect, the most typical ratios for use are in the neighborhood of 1:1, 2:1 and 3:1 on the first day.

[0875] In further aspects, the cells, such as T cells, are combined with agent-coated beads, the beads and the cells are subsequently separated, and then the cells are cultured. In an alternative aspect, prior to culture, the agent-coated beads and cells are not separated but are cultured together. In a further aspect, the beads and cells are first concentrated by application of a force, such as a magnetic force, resulting in increased ligation of cell surface markers, thereby inducing cell stimulation.

[0876] By way of example, cell surface proteins may be ligated by allowing paramagnetic beads to which anti-CD3 and anti-CD28 are attached (3×28 beads) to contact the T cells. In one aspect the cells (for example, 10⁴ to 10⁹ T cells) and beads (for example, DYNABEADS® M-450 CD3/CD28 T paramagnetic beads at a ratio of 1:1) are combined in a buffer, for example PBS (without divalent cations such as, calcium and magnesium). Again, those of ordinary skill in the art can readily appreciate any cell concentration may be used. For example, the target cell may be very rare in the sample and comprise only 0.01% of the sample or the entire sample (i.e., 100%) may comprise the target cell of interest. Accordingly, any cell number is within the context of the present invention. In certain aspects, it may be desirable to significantly decrease the volume in which particles and cells are mixed together (i.e., increase the concentration of cells), to ensure maximum contact of cells and particles. For example, in one aspect, a concentration of about 10 billion cells/ml, 9 billion/ml, 8 billion/ml, 7 billion/ml, 6 billion/ml, 5 billion/ml, or 2 billion cells/ml is used. In one aspect, greater than 100 million cells/ml is used. In a further aspect, a concentration of cells of 10, 15, 20, 25, 30, 35, 40, 45, or 50 million cells/ml is used. In yet one aspect, a concentration of cells from 75, 80, 85, 90, 95, or 100 million cells/ml is used. In further aspects, concentrations of 125 or 150 million cells/ml can be used. Using high concentrations can result in increased cell yield, cell activation, and cell expansion. Further, use of high cell concentrations allows more efficient capture of cells that may weakly express target antigens of interest, such as CD28-negative T cells. Such populations of cells may have therapeutic value and would be desirable to obtain in certain aspects. For example, using high concentration of cells allows more efficient selection of CD8+ T cells that normally have weaker CD28 expression.

[0877] In one embodiment, cells transduced with a nucleic acid encoding an anti-target CAR, e.g., an anti-target CAR described herein, are expanded, e.g., by a method described herein. In one embodiment, the cells are expanded in culture for a period of several hours (e.g., about 2, 3, 4, 5, 6, 7, 8, 9, 10, 15, 18, 21 hours) to about 14 days (e.g., 1, 2, 3, 4, 5, 6, 7, 8, 9, 10, 11, 12, 13 or 14 days). In one embodiment, the cells are expanded for a period of 4 to 9 days. In one embodiment, the cells are expanded for a period of 8 days or less, e.g., 7, 6 or 5 days. In one embodiment, the cells, e.g., an anti-target CAR cell described herein, are expanded in culture for 5 days, and the resulting cells are more potent than the same cells expanded in culture for 9 days under the same culture conditions. Potency can be defined, e.g., by various T cell functions, e.g. proliferation, target cell killing, cytokine production, activation, migration, or combinations thereof. In one embodiment, the cells, e.g., an anti-target CAR cell described herein, expanded for 5 days show at least a one, two, three or four fold increase in cells doublings upon antigen stimulation as compared to the same cells expanded in culture for 9 days under the same culture conditions. In one embodiment, the cells, e.g., the cells expressing an anti-target CAR described herein, are expanded in culture for 5 days, and the resulting cells exhibit higher proinflammatory cytokine production, e.g., IFN-γ and/or GM-CSF levels, as compared to the same cells expanded in culture for 9 days under the same culture conditions. In one embodiment, the cells, e.g., an anti-target CAR cell described herein, expanded for 5 days show at least a one, two, three, four, five, ten fold or more increase in pg/ml of proinflammatory cytokine production, e.g., IFN-γ and/or GM-CSF levels, as compared to the same cells expanded in culture for 9 days under the same culture conditions.

[0878] Several cycles of stimulation may also be desired such that culture time of T cells can be 60 days or more. Conditions appropriate for T cell culture include an appropriate media (e.g., Minimal Essential Media or RPMI Media 1640 or, X-vivo 15, (Lonza)) that may contain factors necessary for proliferation and viability, including serum (e.g., fetal bovine or human serum), interleukin-2 (IL-2), insulin, IFN-γ, IL-4, IL-7, GM-CSF, IL-10, IL-12, IL-15, TGFβ, and TNF-α or any other additives for the growth of cells known to the skilled artisan. Other additives for the growth of cells include, but are not limited to, surfactant, plasmanate, and reducing agents such as N-acetyl-cysteine and 2-mercaptoethanol. Media can include RPMI 1640, AIM-V, DMEM, MEM, α-MEM, F-12, X-Vivo 15, and X-Vivo 20, Optimizer, with added amino acids, sodium pyruvate, and vitamins, either serum-free or supplemented with an appropriate amount of serum (or plasma) or a defined set of hormones, and/or an amount of cytokine(s) sufficient for the growth and expansion of T cells. Antibiotics, e.g., penicillin and streptomycin, are included only in experimental cultures, not in cultures of cells that are to be infused into a subject. The target cells are maintained under conditions necessary to support growth, for example, an appropriate temperature (e.g., 37° C.) and atmosphere (e.g., air plus 5% CO₂).

[0879] In one embodiment, the cells are expanded in an appropriate media (e.g., media described herein) that includes one or more interleukin that result in at least a 200-fold (e.g., 200-fold, 250-fold, 300-fold, 350-fold) increase in cells over a 14 day expansion period, e.g., as measured by a method described herein such as flow cytometry. In one embodiment, the cells are expanded in the presence of IL-15 and/or IL-7 (e.g., IL-15 and IL-7).

[0880] In embodiments, methods described herein, e.g., anti-target CAR-expressing cell manufacturing methods, comprise removing T regulatory cells, e.g., CD25+ T cells, from a cell population, e.g., using an anti-CD25 antibody, or fragment thereof, or a CD25-binding ligand, IL-2. Methods of removing T regulatory cells, e.g., CD25+ T cells, from a cell population are described herein. In embodiments, the methods, e.g., manufacturing methods, further comprise contacting a cell population (e.g., a cell population in which T regulatory cells, such as CD25+ T cells, have been depleted; or a cell population that has previously contacted an anti-CD25 antibody, fragment thereof, or CD25-binding ligand) with IL-15 and/or IL-7. For example, the cell population (e.g., that has previously contacted an anti-CD25 antibody, fragment thereof, or CD25-binding ligand) is expanded in the presence of IL-15 and/or IL-7.

[0881] In some embodiments an anti-target CAR-expressing cell described herein is contacted with a composition comprising a interleukin-15 (IL-15) polypeptide, a interleukin-15 receptor alpha (IL-15Ra) polypeptide, or a combination of both a IL-15 polypeptide and a IL-15Ra polypeptide e.g., hetIL-15, during the manufacturing of the anti-target CAR-expressing cell, e.g., ex vivo. In embodiments, an anti-target CAR-expressing cell described herein is contacted with a composition comprising a IL-15 polypeptide during the manufacturing of the anti-target CAR-expressing cell, e.g., ex vivo. In embodiments, an anti-target CAR-expressing cell described herein is contacted with a composition comprising a combination of both a IL-15 polypeptide and a IL-15 Ra polypeptide during the manufacturing of the anti-target CAR-expressing cell, e.g., ex vivo. In embodiments, an anti-target CAR-expressing cell described herein is contacted with a composition comprising hetIL-15 during the manufacturing of the anti-target CAR-expressing cell, e.g., ex vivo.

[0882] In one embodiment the anti-target CAR-expressing cell described herein is contacted with a composition comprising hetIL-15 during ex vivo expansion. In an embodiment, the anti-target CAR-expressing cell described herein is contacted with a composition comprising an IL-15 polypeptide during ex vivo expansion. In an embodiment, the anti-target CAR-expressing cell described herein is contacted with a composition comprising both an IL-15 polypeptide and an IL-15Ra polypeptide during ex vivo expansion. In one embodiment the contacting results in the survival and proliferation of a lymphocyte subpopulation, e.g., CD8+ T cells.

[0883] T cells that have been exposed to varied stimulation times may exhibit different characteristics. For example, typical blood or apheresed peripheral blood mononuclear cell products have a helper T cell population (TH, CD4+) that is greater than the cytotoxic or suppressor T cell population (TC, CD8+). Ex vivo expansion of T cells by stimulating CD3 and CD28 receptors produces a population of T cells that prior to about days 8-9 consists predominately of TH cells, while after about days 8-9, the population of T cells comprises an increasingly greater population of TC cells. Accordingly, depending on the purpose of treatment, infusing a subject with a T cell population comprising predominately of TH cells may be advantageous. Similarly, if an antigen-specific subset of TC cells has been isolated it may be beneficial to expand this subset to a greater degree.

[0884] Further, in addition to CD4 and CD8 markers, other phenotypic markers vary significantly, but in large part, reproducibly during the course of the cell expansion process. Thus, such reproducibility enables the ability to tailor an activated T cell product for specific purposes.

[0885] Once an anti-target CAR described herein is constructed, various assays can be used to evaluate the activity of the molecule, such as but not limited to, the ability to expand T cells following antigen stimulation, sustain T cell expansion in the absence of re-stimulation, and anti-cancer activities in appropriate in vitro and animal models. Assays to evaluate the effects of a cars of the present invention are described in further detail below

[0886] Western blot analysis of anti-target CAR expression in primary T cells can be used to detect the presence of monomers and dimers. See, e.g., Milone et al., Molecular Therapy 17(8): 1453-1464 (2009). Very briefly, T cells (1:1 mixture of CD4+ and CD8+ T cells) expressing the CARs are expanded in vitro for more than 10 days followed by lysis and SDS-PAGE under reducing conditions. Anti-target CARs containing the full length TCR-cytoplasmic domain and the endogenous TCR-ζ chain are detected by western blotting using an antibody to the TCR-ζ chain. The same T cell subsets are used for SDS-PAGE analysis under non-reducing conditions to permit evaluation of covalent dimer formation.

[0887] In vitro expansion of anti-target CAR⁺ T cells following antigen stimulation can be measured by flow cytometry. For example, a mixture of CD4⁺ and CD8⁺ T cells are stimulated with αCD3/αCD28 aAPCs followed by transduction with lentiviral vectors expressing GFP under the control of the promoters to be analyzed. Exemplary promoters include the CMV IE gene, EF-1α, ubiquitin C, or phosphoglycerokinase (PGK) promoters. GFP fluorescence is evaluated on day 6 of culture in the CD4+ and/or CD8+ T cell subsets by flow cytometry. See, e.g., Milone et al., Molecular Therapy 17(8): 1453-1464 (2009). Alternatively, a mixture of CD4⁺ and CD8⁺ T cells are stimulated with αCD3/αCD28 coated magnetic beads on day 0, and transduced with anti-target CAR on day 1 using a bicistronic lentiviral vector expressing anti-target CAR along with eGFP using a 2A ribosomal skipping sequence. Cultures are re-stimulated with either a cancer associated antigen as described herein⁺ K562 cells (K562 expressing a cancer associated antigen as described herein), wild-type K562 cells (K562 wild type) or K562 cells expressing hCD32 and 4-1BBL in the presence of antiCD3 and anti-CD28 antibody (K562-BBL-3/28) following washing. Exogenous IL-2 is added to the cultures every other day at 100 IU/ml. GFP⁺ T cells are enumerated by flow cytometry using bead-based counting. See, e.g., Milone et al., Molecular Therapy 17(8): 1453-1464 (2009).

[0888] Sustained anti-target CAR⁺ T cell expansion in the absence of re-stimulation can also be measured. See, e.g., Milone et al., Molecular Therapy 17(8): 1453-1464 (2009). Briefly, mean T cell volume (fl) is measured on day 8 of culture using a Coulter Multisizer III particle counter, a Nexcelom Cellometer Vision or Millipore Scepter, following stimulation with αCD3/αCD28 coated magnetic beads on day 0, and transduction with the indicated anti-target CAR on day 1.

[0889] Animal models can also be used to measure anti-target CAR CART activity. For example, the xenograft model using a human cancer cell line as described in Example 1 can be used to measure anti-target CAR CART activity.

[0890] Dose dependent anti-target CAR treatment response can be evaluated. Exemplary methods used for evaluating CAR treatment response can be used to measure anti-target CAR treatment responses. See, e.g., Milone et al., Molecular Therapy 17(8): 1453-1464 (2009). For example, peripheral blood is obtained 35-70 days after establishing leukemia in mice injected on day 21 with CAR T cells, an equivalent number of mock-transduced T cells, or no T cells. Mice from each group are randomly bled for determination of peripheral blood a cancer associate antigen as described herein⁺ ALL blast counts and then killed on days 35 and 49. The remaining animals are evaluated on days 57 and 70.

[0891] Assessment of cell proliferation and cytokine production has been previously described, e.g., at Milone et al., Molecular Therapy 17(8): 1453-1464 (2009). Briefly, assessment of anti-target CAR-mediated proliferation is performed in microtiter plates by mixing washed T cells with K562 cells expressing a cancer associated antigen described herein (K19) or CD32 and CD137 (KT32-BBL) for a final T-cell:K562 ratio of 2:1. K562 cells are irradiated with gamma-radiation prior to use. Anti-CD3 (clone OKT3) and anti-CD28 (clone 9.3) monoclonal antibodies are added to cultures with KT32-BBL cells to serve as a positive control for stimulating T-cell proliferation since these signals support long-term CD8+ T cell expansion ex vivo. T cells are enumerated in cultures using CountBright™ fluorescent beads (Invitrogen, Carlsbad, Calif.) and flow cytometry as described by the manufacturer. CAR⁺ T cells are identified by GFP expression using T cells that are engineered with eGFP-2A linked anti-target CAR-expressing lentiviral vectors. For anti-target CAR+ T cells not expressing GFP, the anti-target CAR+ T cells are detected with biotinylated recombinant a cancer associate antigen as described herein protein and a secondary avidin-PE conjugate. CD4+ and CD8⁺ expression on T cells are also simultaneously detected with specific monoclonal antibodies (BD Biosciences). Cytokine measurements are performed on supernatants collected 24 hours following re-stimulation using the human TH1/TH2 cytokine cytometric bead array kit (BD Biosciences, San Diego, Calif.) according the manufacturer's instructions. Fluorescence is assessed using a FACScalibur flow cytometer, and data is analyzed according to the manufacturer's instructions.

[0892] Cytotoxicity can be assessed by a standard 51Cr-release assay. See, e.g., Milone et al., Molecular Therapy 17(8): 1453-1464 (2009). Briefly, target cells (K562 lines and primary pro-B-ALL cells) are loaded with 51Cr (as NaCrO4, New England Nuclear, Boston, Mass.) at 37° C. for 2 hours with frequent agitation, washed twice in complete RPMI and plated into microtiter plates. Effector T cells are mixed with target cells in the wells in complete RPMI at varying ratios of effector cell:target cell (E:T). Additional wells containing media only (spontaneous release, SR) or a 1% solution of triton-X 100 detergent (total release, TR) are also prepared. After 4 hours of incubation at 37° C., supernatant from each well is harvested. Released 51Cr is then measured using a gamma particle counter (Packard Instrument Co., Waltham, Mass.). Each condition is performed in at least triplicate, and the percentage of lysis is calculated using the formula: % Lysis=(ER−SR)/(TR−SR), where ER represents the average 51Cr released for each experimental condition.

[0893] Imaging technologies can be used to evaluate specific trafficking and proliferation of anti-target CARs in tumor-bearing animal models. Such assays have been described for CARs, for example, in Barrett et al., Human Gene Therapy 22:1575-1586 (2011). Similar assays can be used to evaluate specific trafficking and proliferation of anti-target CARs in tumor-bearing animal models. Briefly, NOD/SCID/γc^{-/-} (NSG) mice are injected IV with Nalm-6 cells followed 7 days later with T cells 4 hour after electroporation with the CAR constructs. The T cells are stably transfected with a lentiviral construct to express firefly luciferase, and mice are imaged for bioluminescence. Alternatively, therapeutic efficacy and specificity of a single injection of CAR⁺ T cells in Nalm-6 xenograft model can be measured as the following: NSG mice are injected with Nalm-6 transduced to stably express firefly luciferase, followed by a single tail-vein injection of T cells electroporated with cars of the present invention 7 days later. Animals are imaged at various time points post injection. For example, photon-density heat maps of firefly luciferase positive leukemia in representative mice at day 5 (2 days before treatment) and day 8 (24 hr post CARP PBLs) can be generated.

[0894] Other assays, including those described in the Example section herein as well as those that are known in the art can also be used to evaluate the anti-target CARs described herein.

### Therapeutic Application

[0895] The modified cells described herein may be included in a composition for therapy. In one aspect, the composition comprises a population of modified T cells comprising a nucleic acid sequence encoding an anti-target CAR. In yet another embodiment, the composition includes a modified T cell comprising an anti-target CAR that comprises a costimulatory domain described herein, e.g., that increases anti-tumor effect and T cell persistence. The composition may include a pharmaceutical composition and further include a pharmaceutically acceptable carrier. A therapeutically effective amount of the pharmaceutical composition comprising the modified cells may be administered.

[0896] In one aspect, the invention includes a method comprising administering a population of modified T cells to a subject in need thereof to treat a disease associated with expression of a target CAR (e.g., a disease in which a target CAR is expressed), wherein the modified T cells comprise a nucleic acid sequence encoding an anti-target CAR. In one embodiment, the disease associated with expression of a target CAR is a cancer, e.g., a cancer as described herein, or a non-cancerous condition, e.g., B cell aplasia.

[0897] In one aspect, the invention provides methods for treating a disease associated with expression of a target CAR (e.g., a disease in which a target CAR is expressed).

[0898] In one aspect, the present invention provides methods of treating a disease associated with expression of a target CAR (e.g., a disease in which a target CAR is expressed), e.g., a cancer, by providing to the subject in need thereof immune effector cells (e.g., T cells, NK cells) that are engineered to express an anti-target CAR described herein, wherein the cancer cells express a target CAR. In one embodiment, the target CAR is expressed on cancer cells. In one embodiment, the target CAR is not expressed, on normal cells. In one embodiment, the method further comprises selecting an anit-target CAR that binds a target CAR with an affinity that allows the anti-target CAR to bind and kill the cancer cells expressing the target CAR. In one embodiment, the selected anti-target CAR has an antigen binding domain that has a binding affinity KD of 10⁻⁴ M to 10⁻⁸ M, e.g., 10⁻⁵ M to 10⁻⁷ M, e.g., 10⁻⁶ M or 10⁻⁷ M, for the target CAR, e.g., for the extracellular domain of the target CAR, e.g., the antigen binding domain or hinge region of the target CAR. In one embodiment, the selected ligand of the anti-target CAR comprises an antibody molecule, e.g., an anti-idiotypic antibody, which has a binding affinity that is at least five-fold, 10-fold, 20-fold, 30-fold, 50-fold, 100-fold or 1,000-fold less than a reference antibody, e.g., an antibody described herein.

[0899] In one embodiment, the disease associated with expression of a target CAR (e.g., a disease in which a target CAR is expressed) to be treated is ALL (acute lymphoblastic leukemia), CLL (chronic lymphocytic leukemia), DLBCL (diffuse large B-cell lymphoma), MCL (Mantle cell lymphoma, or MM (multiple myeloma).

[0900] In one embodiment, the present invention provides methods of treating a disease associated with expression of a target CAR (e.g., a disease in which a target CAR is expressed), e.g., a cancer by providing to the subject in need thereof immune effector cells (e.g., T cells, NK cells) that are engineered to express an anti-target CAR that binds to a target CAR, wherein the subject has experienced relapse and the relapsed cancer cells do not express the antigen bound by the target CAR (e.g., the relapsed cancer cells are negative for the target CAR antigen). In an embodiment,

[0901] a) the target CAR is a CD19CAR, the anti-target CAR binds to the CD19CAR, the subject had a CD19 expressing disease, and the relapse is a CD19-negative relapse;

[0902] b) the target CAR is a CD33 CAR, the anti-target CAR binds to the CD33CAR, the subject had a CD33 expressing disease, and the relapse is a CD33-negative relapse;

[0903] c) the target CAR is an EGFRvIIICAR, the anti-target CAR binds to the EGFRvIIICAR, the subject had a EGFRvIII expressing disease, and the relapse is a EGFRvIII-negative relapse;

[0904] d) the target CAR is a mesothelinCAR, the anti-target CAR binds to the mesothelinCAR, the subject had a mesothelin expressing disease, and the relapse is a mesothelin-negative relapse;

[0905] e) the target CAR is a BCMACAR, the anti-target CAR binds to the BCMACAR, the subject had a BCMA expressing disease, and the relapse is a BCMA-negative relapse;

[0906] f) the target CAR is a CD20CAR, the anti-target CAR binds to the CD20CAR, the subject had a CD20 expressing disease, and the relapse is a CD20-negative relapse;

[0907] g) the target CAR is a CD22CAR, the anti-target CAR binds to the CD22CAR, the subject had a CD22 expressing disease, and the relapse is a CD22-negative relapse;

[0908] h) the target CAR is a CD123CAR, the anti-target CAR binds to the CD123CAR, the subject had a CD123 expressing disease, and the relapse is a CD123-negative relapse; or

[0909] i) the target CAR is a CAR that binds to a tumor antigen described herein, the anti-target CAR binds to the target CAR, the subject had a disease expressing the tumor antigen bound by the target CAR, and the relapse is negative for expression of the tumor antigen bound by the target CAR.

[0910] In one aspect, the present invention relates to treatment of a subject in vivo using an PD1 CAR such that growth of a disease associated with expression of a target CAR (e.g., a disease in which a target CAR is expressed) is inhibited. A PD1 CAR may be used alone to inhibit the growth of a disease associated with expression of a target CAR (e.g., a disease in which a target CAR is expressed). Alternatively, PD1 CAR may be used in conjunction with an anti-target CARs, immunogenic agents, standard cancer treatments, or other antibodies. In one embodiment, the subject is treated with a PD1 CAR and an anti-target CAR described herein. In an embodiment, a PD1 CAR is used in conjunction with anti-target CAR, e.g., an anti-target CAR described herein, and a kinase inhibitor, e.g., a kinase inhibitor described herein.

[0911] In another aspect, a method of treating a subject, e.g., reducing or ameliorating, a hyperproliferative condition or disorder, e.g., a disease associated with expression of a target CAR (e.g., a disease in which a target CAR is expressed), e.g., a cancer, e.g., solid tumor, a soft tissue tumor, or a metastatic lesion, in a subject is provided. As used herein, the term “cancer” is meant to include all types of cancerous growths or oncogenic processes, metastatic tissues or malignantly transformed cells, tissues, or organs, irrespective of histopathologic type or stage of invasiveness. Examples of solid tumors include malignancies, e.g., sarcomas, adenocarcinomas, and carcinomas, of the various organ systems, such as those affecting liver, lung, breast, lymphoid, gastrointestinal (e.g., colon), genitourinary tract (e.g., renal, urothelial cells), prostate and pharynx. Adenocarcinomas include malignancies such as most colon cancers, rectal cancer, renal-cell carcinoma, liver cancer, non-small cell carcinoma of the lung, cancer of the small intestine and cancer of the esophagus. In one embodiment, the cancer is a melanoma, e.g., an advanced stage melanoma. Metastatic lesions of the aforementioned cancers can also be treated or prevented using the methods and compositions of the invention. Examples of other cancers that can be treated include bone cancer, pancreatic cancer, skin cancer, cancer of the head or neck, cutaneous or intraocular malignant melanoma, uterine cancer, ovarian cancer, rectal cancer, cancer of the anal region, stomach cancer, testicular cancer, uterine cancer, carcinoma of the fallopian tubes, carcinoma of the endometrium, carcinoma of the cervix, carcinoma of the vagina, carcinoma of the vulva, Hodgkin Disease, non-Hodgkin lymphoma, cancer of the esophagus, cancer of the small intestine, cancer of the endocrine system, cancer of the thyroid gland, cancer of the parathyroid gland, cancer of the adrenal gland, sarcoma of soft tissue, cancer of the urethra, cancer of the penis, chronic or acute leukemias including acute myeloid leukemia, chronic myeloid leukemia, acute lymphoblastic leukemia, chronic lymphocytic leukemia, solid tumors of childhood, lymphocytic lymphoma, cancer of the bladder, cancer of the kidney or ureter, carcinoma of the renal pelvis, neoplasm of the central nervous system (CNS), primary CNS lymphoma, tumor angiogenesis, spinal axis tumor, brain stem glioma, pituitary adenoma, Kaposi's sarcoma, epidermoid cancer, squamous cell cancer, T-cell lymphoma, environmentally induced cancers including those induced by asbestos, and combinations of said cancers. Treatment of metastatic cancers, e.g., metastatic cancers that express PD-L1 (Iwai et al. (2005) Int. Immunol. 17:133-144) can be effected using the antibody molecules described herein.

[0912] Exemplary cancers whose growth can be inhibited include cancers typically responsive to immunotherapy. Non-limiting examples of cancers for treatment include melanoma (e.g., metastatic malignant melanoma), renal cancer (e.g. clear cell carcinoma), prostate cancer (e.g. hormone refractory prostate adenocarcinoma), breast cancer, colon cancer and lung cancer (e.g. non-small cell lung cancer). Additionally, refractory or recurrent malignancies can be treated using the molecules described herein.

[0913] In one aspect, the invention pertains to a vector comprising an anti-target CAR operably linked to promoter for expression in mammalian immune effector cells (e.g., T cells, NK cells). In one aspect, the invention provides a recombinant immune effector cell expressing an anti-target CAR of the present invention for use in treating a disease associated with expression of a target CAR. In one aspect, anti-target CAR-expressing cells of the invention are capable of contacting a cell, e.g., a cell expressing a target CAR, e.g., a cell from a disease associated with expression of the target CAR (e.g., a cancer) with at least one target CAR molecule expressed on its surface such that the anti-target CAR-expressing cell targets the cancer cell and growth of the cancer is inhibited.

[0914] In one aspect, the invention pertains to a method of inhibiting growth of a disease associated with expression of a target CAR, e.g., a cancer, comprising contacting the cancer cell with an anti-target CAR-expressing cell of the present invention such that the CART is activated in response to the target CAR antigen and targets the cancer cell expressing the target CAR, wherein the growth of the tumor associated with the target CAR is inhibited.

[0915] In one aspect, the invention pertains to a method of treating disease associated with expression of a target CAR, e.g., a cancer in a subject. The method comprises administering to the subject anti-target CAR-expressing cell of the present invention such that the cancer is treated in the subject. In one aspect, the cancer associated with expression of a target CAR as described herein is a hematological cancer. In one aspect, the hematological cancer is a leukemia or a lymphoma. In one aspect, a cancer associated with expression of target CAR as described herein includes cancers and malignancies including, but not limited to, e.g., one or more acute leukemias including but not limited to, e.g., B-cell acute Lymphoid Leukemia (“BALL”), T-cell acute Lymphoid Leukemia (“TALL”), acute lymphoid leukemia (ALL); one or more chronic leukemias including but not limited to, e.g., chronic myelogenous leukemia (CML), Chronic Lymphoid Leukemia (CLL). Additional cancers or hematologic conditions associated with expression of a target CAR as described herein include, but are not limited to, e.g., B cell prolymphocytic leukemia, blastic plasmacytoid dendritic cell neoplasm, Burkitt's lymphoma, diffuse large B cell lymphoma, Follicular lymphoma, Hairy cell leukemia, small cell- or a large cell-follicular lymphoma, malignant lymphoproliferative conditions, MALT lymphoma, mantle cell lymphoma, Marginal zone lymphoma, multiple myeloma, myelodysplasia and myelodysplastic syndrome, non-Hodgkin lymphoma, plasmablastic lymphoma, plasmacytoid dendritic cell neoplasm, Waldenstrom macroglobulinemia, and “preleukemia” which are a diverse collection of hematological conditions united by ineffective production (or dysplasia) of myeloid blood cells, and the like. Further a disease associated with expression of a target CAR as described herein expression include, but not limited to, e.g., atypical and/or non-classical cancers, malignancies, precancerous conditions, immune-related disorders, e.g., B cell aplasia, or proliferative diseases associated with expression of a target CAR as described herein.

[0916] In some embodiments, a disease associated with expression of a target CAR, e.g., a cancer, that can be treated with anti-target CAR-expressing cell of the present invention is multiple myeloma. Multiple myeloma is a cancer of the blood, characterized by accumulation of a plasma cell clone in the bone marrow. Current therapies for multiple myeloma include, but are not limited to, treatment with lenalidomide, which is an analog of thalidomide. Lenalidomide has activities which include anti-tumor activity, angiogenesis inhibition, and immunomodulation. Generally, myeloma cells are thought to be negative for a cancer associate antigen as described herein expression by flow cytometry. Thus, in some embodiments, an anti-target CAR that binds to a CD19CAR, e.g., as described herein, may be used to target myeloma cells that do not express CD19. In some embodiments, anti-target CARS of the present invention therapy can be used in combination with one or more additional therapies, e.g., lenalidomide treatment.

[0917] The invention includes a type of cellular therapy where immune effector cells (e.g., T cells, NK cells) are genetically modified to express an anti-target CAR and the anti-target CAR-expressing T cell or NK cell is infused to a recipient in need thereof. The infused cell is able to kill cells associated with expression of a target CAR, e.g., tumor cells, in the recipient. Unlike antibody therapies, anti-target CAR-modified immune effector cells (e.g., T cells, NK cells) are able to replicate in vivo resulting in long-term persistence that can lead to sustained tumor control. In various aspects, the immune effector cells (e.g., T cells, NK cells) administered to the patient, or their progeny, persist in the patient for at least four months, five months, six months, seven months, eight months, nine months, ten months, eleven months, twelve months, thirteen months, fourteen month, fifteen months, sixteen months, seventeen months, eighteen months, nineteen months, twenty months, twenty-one months, twenty-two months, twenty-three months, two years, three years, four years, or five years after administration of the T cell or NK cell to the patient.

[0918] The invention also includes a type of cellular therapy where immune effector cells (e.g., T cells, NK cells) are modified, e.g., by in vitro transcribed RNA, to transiently express an anti-target CAR and the anti-target CAR T cell or NK cell is infused to a recipient in need thereof. The infused cell is able to kill cells associated with expression of a target CAR, e.g., tumor cells in the recipient. Thus, in various aspects, the immune effector cells (e.g., T cells, NK cells) administered to the patient, is present for less than one month, e.g., three weeks, two weeks, one week, after administration of the T cell or NK cell to the patient.

[0919] Without wishing to be bound by any particular theory, the anti-tumor immunity response elicited by the anti-target CAR-modified immune effector cells (e.g., T cells, NK cells) may be an active or a passive immune response, or alternatively may be due to a direct vs indirect immune response. In one aspect, the anti-target CAR transduced immune effector cells (e.g., T cells, NK cells) exhibit specific proinflammatory cytokine secretion and potent cytolytic activity in response to human cancer cells expressing the target CAR described herein, resist inhibition with a soluble cancer associate antigen as described herein, or mediate bystander killing and mediate regression of an established human tumor.

[0920] In one aspect, the fully-human anti-target CAR-modified immune effector cells (e.g., T cells, NK cells) of the invention may be a type of vaccine for ex vivo immunization and/or in vivo therapy in a mammal. In one aspect, the mammal is a human.

[0921] With respect to ex vivo immunization, at least one of the following occurs in vitro prior to administering the cell into a mammal: i) expansion of the cells, ii) introducing a nucleic acid encoding an anti-target CAR to the cells or iii) cryopreservation of the cells.

[0922] Ex vivo procedures are well known in the art and are discussed more fully below. Briefly, cells are isolated from a mammal (e.g., a human) and genetically modified (i.e., transduced or transfected in vitro) with a vector expressing an anti-target CAR disclosed herein. The anti-target CAR-modified cell can be administered to a mammalian recipient to provide a therapeutic benefit. The mammalian recipient may be a human and the anti-target CAR-modified cell can be autologous with respect to the recipient. Alternatively, the cells can be allogeneic, syngeneic or xenogeneic with respect to the recipient.

[0923] The procedure for ex vivo expansion of hematopoietic stem and progenitor cells is described in U.S. Pat. No. 5,199,942, incorporated herein by reference, can be applied to the cells of the present invention. Other suitable methods are known in the art, therefore the present invention is not limited to any particular method of ex vivo expansion of the cells. Briefly, ex vivo culture and expansion of immune effector cells (e.g., T cells, NK cells) comprises: (1) collecting CD34+ hematopoietic stem and progenitor cells from a mammal from peripheral blood harvest or bone marrow explants; and (2) expanding such cells ex vivo. In addition to the cellular growth factors described in U.S. Pat. No. 5,199,942, other factors such as flt3-L, IL-1, IL-3 and c-kit ligand, can be used for culturing and expansion of the cells.

[0924] In addition to using a cell-based vaccine in terms of ex vivo immunization, the present invention also provides compositions and methods for in vivo immunization to elicit an immune response directed against an antigen in a patient.

[0925] Generally, the cells activated and expanded as described herein may be utilized in the treatment and prevention of diseases that arise in individuals who are immunocompromised. In particular, the anti-target CAR-modified immune effector cells (e.g., T cells, NK cells) of the invention are used in the treatment of diseases, disorders and conditions associated with expression of a target CAR as described herein. In certain aspects, the cells of the invention are used in the treatment of patients at risk for developing diseases, disorders and conditions associated with expression of a target CAR as described herein. Thus, the present invention provides methods for the treatment of diseases, disorders and conditions associated with expression of a target CAR as described herein comprising administering to a subject in need thereof, a therapeutically effective amount of the anti-target CAR-modified immune effector cells (e.g., T cells, NK cells) of the invention.

[0926] In one aspect the anti-target CAR-expressing cells of the inventions may be used to treat a disease associated with expression of a target CAR, e.g., a proliferative disease such as a cancer or malignancy or is a precancerous condition such as a myelodysplasia, a myelodysplastic syndrome or a preleukemia. Further a disease associated with a target CAR expression as described herein expression include, but not limited to, e.g., atypical and/or non-classical cancers, malignancies, precancerous conditions, or proliferative diseases expressing a target CAR as described herein. Non-cancer related indications associated with expression of a target CAR herein include, but are not limited to, e.g., autoimmune disease, (e.g., lupus), inflammatory disorders (allergy and asthma), immune-related disorders, e.g., B cell aplasia, and transplantation. In an embodiment, the disease is B cell aplasia.

[0927] The anti-target CAR-modified immune effector cells (e.g., T cells, NK cells) of the present invention may be administered either alone, or as a pharmaceutical composition in combination with diluents and/or with other components such as IL-2 or other cytokines or cell populations.

[0928] Hematologic Cancer

[0929] Hematological cancer conditions are the types of cancer such as leukemia, lymphoma, and malignant lymphoproliferative conditions that affect blood, bone marrow and the lymphatic system.

[0930] Leukemia can be classified as acute leukemia and chronic leukemia. Acute leukemia can be further classified as acute myelogenous leukemia (AML) and acute lymphoid leukemia (ALL). Chronic leukemia includes chronic myelogenous leukemia (CML) and chronic lymphoid leukemia (CLL). Other related conditions include myelodysplastic syndromes (MDS, formerly known as “preleukemia”) which are a diverse collection of hematological conditions united by ineffective production (or dysplasia) of myeloid blood cells and risk of transformation to AML.

[0931] Lymphoma is a group of blood cell tumors that develop from lymphocytes. Exemplary lymphomas include non-Hodgkin lymphoma and Hodgkin lymphoma.

[0932] The present invention provides for compositions and methods for treating cancer. In one aspect, the cancer is a hematologic cancer including but is not limited to hematological cancer is a leukemia or a lymphoma. In one aspect, the anti-target CAR-expressing cells of the invention may be used to treat cancers and malignancies such as, but not limited to, e.g., acute leukemias including but not limited to, e.g., B-cell acute lymphoid leukemia (“BALL”), T-cell acute lymphoid leukemia (“TALL”), acute lymphoid leukemia (ALL); one or more chronic leukemias including but not limited to, e.g., chronic myelogenous leukemia (CML), chronic lymphocytic leukemia (CLL); additional hematologic cancers or hematologic conditions including, but not limited to, e.g., B cell prolymphocytic leukemia, blastic plasmacytoid dendritic cell neoplasm, Burkitt's lymphoma, diffuse large B cell lymphoma, Follicular lymphoma, Hairy cell leukemia, small cell- or a large cell-follicular lymphoma, malignant lymphoproliferative conditions, MALT lymphoma, mantle cell lymphoma, Marginal zone lymphoma, multiple myeloma, myelodysplasia and myelodysplastic syndrome, non-Hodgkin lymphoma, plasmablastic lymphoma, plasmacytoid dendritic cell neoplasm, Waldenstrom macroglobulinemia, and “preleukemia” which are a diverse collection of hematological conditions united by ineffective production (or dysplasia) of myeloid blood cells, and the like. Further a disease associated with a cancer associate antigen as described herein expression includes, but not limited to, e.g., atypical and/or non-classical cancers, malignancies, precancerous conditions or proliferative diseases expressing a cancer associate antigen as described herein.

[0933] The present invention also provides methods for inhibiting the proliferation or reducing a cancer associated antigen as described herein-expressing cell population, the methods comprising contacting a population of cells comprising a target CAR as described herein-expressing cell with an anti-target CAR-expressing T cell or NK cell of the invention that binds to the target CAR-expressing cell. In a specific aspect, the present invention provides methods for inhibiting the proliferation or reducing the population of cells expressing a target CAR, e.g., cancer cells, as described herein, the methods comprising contacting a target CAR-expressing cancer cell population with an anti-target CAR-expressing T cell or NK cell of the invention that binds to a target CAR-expressing cell. In one aspect, the present invention provides methods for inhibiting the proliferation or reducing the population of cells expressing a target CAR as described herein, the methods comprising contacting a target CAR-expressing cancer cell population with an anti-target CAR-expressing T cell or NK cell of the invention that binds to a target CAR-expressing cell. In certain aspects, an anti-target CAR-expressing T cell or NK cell of the invention reduces the quantity, number, amount or percentage of target CAR expressing cells, e.g., cancer cells by at least 25%, at least 30%, at least 40%, at least 50%, at least 65%, at least 75%, at least 85%, at least 95%, or at least 99% in a subject with or animal model for myeloid leukemia or another cancer associated with a target CAR described herein-expressing cells relative to a negative control. In one aspect, the subject is a human.

[0934] The present invention also provides methods for preventing, treating and/or managing a disease associated with expression of a target CAR-expressing cells (e.g., a hematologic cancer or atypical cancer expressing a cancer associated antigen as described herein), the methods comprising administering to a subject in need an anti-target CAR T cell or NK cell of the invention that binds to target CAR-expressing cell. In one aspect, the subject is a human. Non-limiting examples of disorders associated with a target CAR-expressing cells include autoimmune disorders (such as lupus), inflammatory disorders (such as allergies and asthma), immune related disorders such as B cell aplasia, and cancers (such as hematological cancers or atypical cancers expressing a target CAR as described herein).

[0935] The present invention also provides methods for preventing, treating and/or managing a disease associated with a target CAR as described herein-expressing cells, the methods comprising administering to a subject in need an anti-target CAR T cell or NK cell of the invention that binds to a target CAR-expressing cell. In one aspect, the subject is a human.

[0936] The present invention provides methods for treating relapse of cancer associated with target CAR-expressing cells, the methods comprising administering to a subject in need thereof an anti-target CAR T cell or NK cell of the invention that binds to a target CAR as described herein-expressing cell. In one aspect, the methods comprise administering to the subject in need thereof an effective amount of an anti-target CAR-expressing T cell or NK cell described herein that binds to a target CAR as described herein-expressing cell in combination with an effective amount of another therapy.

### Combination Therapies

[0937] A CAR-expressing cell, e.g., an anti-target CAR expressing cell described herein, may be used in combination with other known agents and therapies. Administered “in combination”, as used herein, means that two (or more) different treatments are delivered to the subject during the course of the subject's affliction with the disorder, e.g., the two or more treatments are delivered after the subject has been diagnosed with the disorder and before the disorder has been cured or eliminated or treatment has ceased for other reasons. In some embodiments, the delivery of one treatment is still occurring when the delivery of the second begins, so that there is overlap in terms of administration. This is sometimes referred to herein as “simultaneous” or “concurrent delivery”. In other embodiments, the delivery of one treatment ends before the delivery of the other treatment begins. In some embodiments of either case, the treatment is more effective because of combined administration. For example, the second treatment is more effective, e.g., an equivalent effect is seen with less of the second treatment, or the second treatment reduces symptoms to a greater extent, than would be seen if the second treatment were administered in the absence of the first treatment, or the analogous situation is seen with the first treatment. In some embodiments, delivery is such that the reduction in a symptom, or other parameter related to the disorder is greater than what would be observed with one treatment delivered in the absence of the other. The effect of the two treatments can be partially additive, wholly additive, or greater than additive. The delivery can be such that an effect of the first treatment delivered is still detectable when the second is delivered.

[0938] A CAR-expressing cell, e.g., an anti-target CAR expressing cell described herein and the at least one additional therapeutic agent can be administered simultaneously, in the same or in separate compositions, or sequentially. For sequential administration, the CAR-expressing cell described herein can be administered first, and the additional agent can be administered second, or the order of administration can be reversed.

[0939] The anti-target CAR therapy and/or other therapeutic agents, procedures or modalities can be administered during periods of active disorder, or during a period of remission or less active disease. The anti-target CAR therapy can be administered before the other treatment, concurrently with the treatment, post-treatment, or during remission of the disorder.

[0940] When administered in combination, the anti-target CAR therapy and the additional agent (e.g., second or third agent), or all, can be administered in an amount or dose that is higher, lower or the same than the amount or dosage of each agent used individually, e.g., as a monotherapy. In certain embodiments, the administered amount or dosage of the anti-target CAR therapy, the additional agent (e.g., second or third agent), or all, is lower (e.g., at least 20%, at least 30%, at least 40%, or at least 50%) than the amount or dosage of each agent used individually, e.g., as a monotherapy. In other embodiments, the amount or dosage of the anti-target CAR therapy, the additional agent (e.g., second or third agent), or all, that results in a desired effect (e.g., treatment of cancer) is lower (e.g., at least 20%, at least 30%, at least 40%, or at least 50% lower) than the amount or dosage of each agent used individually, e.g., as a monotherapy, required to achieve the same therapeutic effect.

[0941] In certain embodiments of the methods or uses described herein, the anti-target CAR molecule is administered in combination with an agent that increases the efficacy of the immune effector cell, e.g., one or more of a protein phosphatase inhibitor, a kinase inhibitor, a cytokine, an inhibitor of an immune inhibitory molecule; or an agent that decreases the level or activity of a T_{REG} cell.

[0942] In certain embodiments of the methods or uses described herein, the protein phosphatase inhibitor is a SHP-1 inhibitor and/or an SHP-2 inhibitor.

[0943] In other embodiments of the methods or uses described herein, kinase inhibitor is chosen from one or more of a CDK4 inhibitor, a CDK4/6 inhibitor (e.g., palbociclib), a BTK inhibitor (e.g., ibrutinib or RN-486), an mTOR inhibitor (e.g., rapamycin or everolimus (RAD001)), an MNK inhibitor, or a dual P13K/mTOR inhibitor. In one embodiment, the BTK inhibitor does not reduce or inhibit the kinase activity of interleukin-2-inducible kinase (ITK).

[0944] In other embodiments of the methods or uses described herein, the agent that inhibits the immune inhibitory molecule comprises an antibody or antibody fragment, an inhibitory nucleic acid, a clustered regularly interspaced short palindromic repeats (CRISPR), a transcription-activator like effector nuclease (TALEN), or a zinc finger endonuclease (ZFN) that inhibits the expression of the inhibitory molecule.

[0945] In other embodiments of the methods or uses described herein, the agent that decreases the level or activity of the T_{REG} cells is chosen from cyclophosphamide, anti-GITR antibody, CD25-depletion, or a combination thereof.

[0946] In certain embodiments of the methods or uses described herein, the immune inhibitory molecule is selected from the group consisting of PD1, PD-L1, CTLA-4, TIM-3, LAG-3, VISTA, BTLA, TIGIT, LAIR1, CD160, 2B4, TGF beta, CEACAM-1, CEACAM-3, and CEACAM-5.

[0947] In other embodiments, the agent that inhibits the inhibitory molecule comprises a first polypeptide comprising an inhibitory molecule or a fragment thereof and a second polypeptide that provides a positive signal to the cell, and wherein the first and second polypeptides are expressed on the anti-target CAR-containing immune cells, wherein (i) the first polypeptide comprises PD1, PD-L1, CTLA-4, TIM-3, LAG3, VISTA, BTLA, TIGIT, LAIR1, CD160, 2B4, TGF beta, CEACAM-1, CEACAM-3, and CEACAM-5 or a fragment thereof; and/or (ii) the second polypeptide comprises an intracellular signaling domain comprising a primary signaling domain and/or a costimulatory signaling domain. In one embodiment, the primary signaling domain comprises a functional domain of CD3 zeta; and/or the costimulatory signaling domain comprises a functional domain of a protein selected from 41BB, CD27 and CD28.

[0948] In other embodiments, cytokine is chosen from IL-7, IL-15 or IL-21, or both.

[0949] In other embodiments, the immune effector cell comprising the anti-target CAR molecule and a second, e.g., any of the combination therapies disclosed herein (e.g., the agent that that increases the efficacy of the immune effector cell) are administered substantially simultaneously or sequentially.

[0950] In other embodiments, the immune cell comprising the anti-target CAR molecule is administered in combination with a molecule that targets GITR and/or modulates GITR function. In certain embodiments, the molecule targeting GITR and/or modulating GITR function is administered prior to the anti-target CAR-expressing cell or population of cells, or prior to apheresis.

[0951] In one embodiment, lymphocyte infusion, for example allogeneic lymphocyte infusion, is used in the treatment of the cancer, wherein the lymphocyte infusion comprises at least one anti-target CAR-expressing cell of the present invention. In one embodiment, autologous lymphocyte infusion is used in the treatment of the cancer, wherein the autologous lymphocyte infusion comprises at least one anti-target CAR-expressing cell described herein.

[0952] In one embodiment, the cell is a T cell and the T cell is diacylglycerol kinase (DGK) deficient. In one embodiment, the cell is a T cell and the T cell is Ikaros deficient. In one embodiment, the cell is a T cell and the T cell is both DGK and Ikaros deficient.

[0953] In one embodiment, the method includes administering a cell expressing the anti-target CAR moleculein combination with an agent which enhances the activity of a anti-target CAR-expressing cell, wherein the agent is a cytokine, e.g., IL-7, IL-15, IL-21, or a combination thereof. The cytokine can be delivered in combination with, e.g., simultaneously or shortly after, administration of the anti-target CAR-expressing cell. Alternatively, the cytokine can be delivered after a prolonged period of time after administration of the anti-target CAR-expressing cell, e.g., after assessment of the subject's response to the anti-target CAR-expressing cell. In one embodiment the cytokine is administered to the subject simultaneously (e.g., administered on the same day) with or shortly after administration (e.g., administered 1 day, 2 days, 3 days, 4 days, 5 days, 6 days, or 7 days after administration) of the cell or population of cells of any of claims 61-80. In other embodiments, the cytokine is administered to the subject after a prolonged period of time (e.g., at least 2 weeks, 3 weeks, 4 weeks, 6 weeks, 8 weeks, 10 weeks, or more) after administration of the cell or population of cells of any of claims 61-80, or after assessment of the subject's response to the cell.

[0954] In other embodiments, the cells expressing an anti-target CAR molecule are administered in combination with an agent that reduces or ameliorates one or more side effects associated with administration of a cell expressing a anti-target CAR molecule. Side effects associated with the anti-target CAR-expressing cell can be chosen from cytokine release syndrome (CRS) or hemophagocytic lymphohistiocytosis (HLH).

[0955] In embodiments of any of the aforesaid methods or uses, the cells expressing the anti-target CAR molecule are administered in combination with an agent that treats the disease associated with expression of target CAR, e.g., any of the second or third therapies disclosed herein. Additional exemplary combinations include one or more of the following.

[0956] In another embodiment, the cell expressing the anti-target CAR molecule, e.g., as described herein, can be administered in combination with another agent, e.g., a kinase inhibitor and/or checkpoint inhibitor described herein. In an embodiment, a cell expressing the anti-target CAR molecule can further express another agent, e.g., an agent which enhances the activity of an anti-target CAR-expressing cell.

[0957] For example, in one embodiment, the agent that enhances the activity of an anti-target CAR-expressing cell can be an agent which inhibits an inhibitory molecule (e.g., an immune inhibitor molecule). Examples of inhibitory molecules include PD1, PD-L1, CTLA-4, TIM-3, CEACAM (e.g., CEACAM-1, CEACAM-3 and/or CEACAM-5), LAG-3, VISTA, BTLA, TIGIT, LAIR1, CD160, 2B4 and TGF beta.

[0958] In one embodiment, the agent that inhibits the inhibitory molecule is an inhibitory nucleic acid is a dsRNA, a siRNA, or a shRNA. In embodiments, the inhibitory nucleic acid is linked to the nucleic acid that encodes a component of the anti-target CAR molecule. For example, the inhibitory molecule can be expressed on the anti-target CAR-expressing cell.

[0959] In another embodiment, the agent which inhibits an inhibitory molecule, e.g., is a molecule described herein, e.g., an agent that comprises a first polypeptide, e.g., an inhibitory molecule, associated with a second polypeptide that provides a positive signal to the cell, e.g., an intracellular signaling domain described herein. In one embodiment, the agent comprises a first polypeptide, e.g., of an inhibitory molecule such as PD-1, PD-L1, CTLA-4, TIM-3, CEACAM (e.g., CEACAM-1, CEACAM-3 and/or CEACAM-5), LAG-3, VISTA, BTLA, TIGIT, LAIR1, CD160, 2B4 or TGF beta, or a fragment of any of these (e.g., at least a portion of the extracellular domain of any of these), and a second polypeptide which is an intracellular signaling domain described herein (e.g., comprising a costimulatory domain (e.g., 41BB, CD27 or CD28, e.g., as described herein) and/or a primary signaling domain (e.g., a CD3 zeta signaling domain described herein). In one embodiment, the agent comprises a first polypeptide of PD1 or a fragment thereof (e.g., at least a portion of the extracellular domain of PD1), and a second polypeptide of an intracellular signaling domain described herein (e.g., a 4-1BB signaling domain described herein and/or a CD3 zeta signaling domain described herein).

[0960] In one embodiment, the anti-target CAR-expressing immune effector cell of the present invention, e.g., T cell or NK cell, is administered to a subject that has received a previous stem cell transplantation, e.g., autologous stem cell transplantation.

[0961] In one embodiment, the anti-target CAR-expressing immune effector cell of the present invention, e.g., T cell or NK cells, is administered to a subject that has received a previous dose of melphalan.

[0962] In one embodiment, the cell expressing an anti-target CAR molecule, e.g., an anti-target CAR molecule described herein, is administered in combination with an agent that increases the efficacy of a cell expressing an anti-target CAR molecule, e.g., an agent described herein.

[0963] In one embodiment, the cells expressing an anti-target CAR molecule are administered in combination with a low, immune enhancing dose of an mTOR inhibitor. While not wishing to be bound by theory, it is believed that treatment with a low, immune enhancing, dose (e.g., a dose that is insufficient to completely suppress the immune system but sufficient to improve immune function) is accompanied by a decrease in PD-1 positive T cells or an increase in PD-1 negative cells. PD-1 positive T cells, but not PD-1 negative T cells, can be exhausted by engagement with cells which express a PD-1 ligand, e.g., PD-L1 or PD-L2.

[0964] In an embodiment this approach can be used to optimize the performance of anti-target CAR cells described herein in the subject. While not wishing to be bound by theory, it is believed that, in an embodiment, the performance of endogenous, non-modified immune effector cells, e.g., T cells or NK cells, is improved. While not wishing to be bound by theory, it is believed that, in an embodiment, the performance of a target antigen anti-target CAR-expressing cell is improved. In other embodiments, cells, e.g., T cells or NK cells, which have, or will be engineered to express an anti-target CAR, can be treated ex vivo by contact with an amount of an mTOR inhibitor that increases the number of PD1 negative immune effector cells, e.g., T cells or increases the ratio of PD1 negative immune effector cells, e.g., T cells/PD1 positive immune effector cells, e.g., T cells.

[0965] In an embodiment, administration of a low, immune enhancing, dose of an mTOR inhibitor, e.g., an allosteric inhibitor, e.g., RAD001, or a catalytic inhibitor, is initiated prior to administration of an anti-target CAR expressing cell described herein, e.g., T cells or NK cells. In an embodiment, the anti-target CAR cells are administered after a sufficient time, or sufficient dosing, of an mTOR inhibitor, such that the level of PD1 negative immune effector cells, e.g., T cells or NK cells, or the ratio of PD1 negative immune effector cells, e.g., T cells/PD1 positive immune effector cells, e.g., T cells, has been, at least transiently, increased.

[0966] In an embodiment, the cell, e.g., T cell or NK cell, to be engineered to express an anti-target CAR, is harvested after a sufficient time, or after sufficient dosing of the low, immune enhancing, dose of an mTOR inhibitor, such that the level of PD1 negative immune effector cells, e.g., T cells, or the ratio of PD1 negative immune effector cells, e.g., T cells/PD1 positive immune effector cells, e.g., T cells, in the subject or harvested from the subject has been, at least transiently, increased.

[0967] In one embodiment, the cell expressing an anti-target CAR molecule is administered in combination with an agent that reduces or ameliorates one or more side effect associated with administration of a cell expressing an anti-target CAR molecule, e.g., an agent described herein.

[0968] In one embodiment, the cell expressing an anti-target CAR molecule is administered in combination with an agent that treats the disease associated with a cancer associated antigen as described herein, e.g., an agent described herein.

[0969] In one embodiment, a cell expressing two or more anti-target CAR molecules, e.g., as described herein, is administered to a subject in need thereof to treat cancer. In one embodiment, a population of cells including an anti-target CAR expressing cell, e.g., as described herein, is administered to a subject in need thereof to treat cancer.

[0970] In one embodiment, the cell expressing an anti-target CAR molecule, is administered at a dose and/or dosing schedule described herein.

[0971] In one embodiment, the anti-target CAR molecule is introduced into immune effector cells (e.g., T cells, NK cells), e.g., using in vitro transcription, and the subject (e.g., human) receives an initial administration of cells comprising an anti-target CAR molecule and one or more subsequent administrations of cells comprising an anti-target CAR molecule wherein the one or more subsequent administrations are administered less than 15 days, e.g., 14, 13, 12, 11, 10, 9, 8, 7, 6, 5, 4, 3, or 2 days after the previous administration. In one embodiment, more than one administration of cells comprising an anti-target CAR molecule are administered to the subject (e.g., human) per week, e.g., 2, 3, or 4 administrations of cells comprising an anti-target CAR molecule are administered per week. In one embodiment, the subject (e.g., human subject) receives more than one administration of cells comprising an anti-target CAR molecule per week (e.g., 2, 3 or 4 administrations per week) (also referred to herein as a cycle), followed by a week of no administration of cells comprising an anti-target CAR molecule and then one or more additional administration of cells comprising an anti-target CAR molecule (e.g., more than one administration of the cells comprising an anti-target CAR molecule per week) is administered to the subject. In another embodiment, the subject “(e.g., human subject)” receives more than one cycle of cells comprising an anti-target CAR molecule, and the time between each cycle is less than 10, 9, 8, 7, 6, 5, 4, or 3 days. In one embodiment, the cells comprising an anti-target CAR molecule are administered every other day for 3 administrations per week. In one embodiment, the cells comprising an anti-target CAR molecule are administered for at least two, three, four, five, six, seven, eight or more weeks.

[0972] In one embodiment, a population of cells described herein is administered.

[0973] In another aspect, the invention pertains to the isolated nucleic acid molecule encoding an anti-target CAR of the invention, the isolated polypeptide molecule of an anti-target CAR of the invention, the vector comprising an anti-target CAR of the invention, and the cell comprising an anti-target CAR of the invention for use as a medicament.

[0974] In another aspect, the invention pertains to a the isolated nucleic acid molecule encoding an anti-target CAR of the invention, the isolated polypeptide molecule of an anti-target CAR of the invention, the vector comprising an anti-target CAR of the invention, and the cell comprising a CAR of the invention for use in the treatment of a disease expressing a target CAR as described herein.

[0975] In another aspect, the invention pertains to a cell expressing an anti-target CAR molecule for use as a medicament in combination with a cytokine, e.g., IL-7, IL-15 and/or IL-21 as described herein. In another aspect, the invention pertains to a cytokine described herein for use as a medicament in combination with a cell expressing an anti-target CAR molecule described herein.

[0976] In another aspect, the invention pertains to a cell expressing an anti-target CAR molecule for use as a medicament in combination with a kinase inhibitor and/or a checkpoint inhibitor as described herein. In another aspect, the invention pertains to a kinase inhibitor and/or a checkpoint inhibitor described herein for use as a medicament in combination with a cell expressing an anti-target CAR molecule described herein.

[0977] In another aspect, the invention pertains to a cell expressing an anti-target CAR molecule for use in combination with a cytokine, e.g., IL-7, IL-15 and/or IL-21 as described herein, in the treatment of a disease expressing a target CAR targeted by the anti-target CAR. In another aspect, the invention pertains to a cytokine described herein for use in combination with a cell expressing an anti-target CAR molecule described herein, in the treatment of a disease expressing a target CAR targeted by the anti-target CAR.

[0978] In another aspect, the invention pertains to a cell expressing an anti-target CAR molecule for use in combination with a kinase inhibitor and/or a checkpoint inhibitor as described herein, in the treatment of a disease expressing a target CAR targeted by the anti-target CAR. In another aspect, the invention pertains to a kinase inhibitor and/or a checkpoint inhibitor described herein for use in combination with a cell expressing a anti-target CAR molecule described herein, in the treatment of a disease expressing target CAR targeted by the CAR.

[0979] In one embodiment of the methods or uses described herein, the anti-target CAR molecule is administered in combination with another agent. In one embodiment, the agent can be a kinase inhibitor, e.g., a CDK4/6 inhibitor, a BTK inhibitor, an mTOR inhibitor, a MNK inhibitor, or a dual PI3K/mTOR inhibitor, and combinations thereof. In one embodiment, the kinase inhibitor is a CDK4 inhibitor, e.g., a CDK4 inhibitor described herein, e.g., a CD4/6 inhibitor, such as, e.g., 6-Acetyl-8-cyclopentyl-5-methyl-2-(5-piperazin-1-yl-pyridin-2-ylamino)-8H-pyrido[2,3-d]pyrimidin-7-one, hydrochloride (also referred to as palbociclib or PD0332991). In one embodiment, the kinase inhibitor is a BTK inhibitor, e.g., a BTK inhibitor described herein, such as, e.g., ibrutinib. In one embodiment, the kinase inhibitor is an mTOR inhibitor, e.g., an mTOR inhibitor described herein, such as, e.g., rapamycin, a rapamycin analog, OSI-027. The mTOR inhibitor can be, e.g., an mTORC1 inhibitor and/or an mTORC2 inhibitor, e.g., an mTORC1 inhibitor and/or mTORC2 inhibitor described herein. In one embodiment, the kinase inhibitor is a MNK inhibitor, e.g., a MNK inhibitor described herein, such as, e.g., 4-amino-5-(4-fluoroanilino)-pyrazolo [3,4-d] pyrimidine. The MNK inhibitor can be, e.g., a MNK1a, MNK1b, MNK2a and/or MNK2b inhibitor. The dual PI3K/mTOR inhibitor can be, e.g., PF-04695102.

[0980] In one embodiment of the methods or uses described herein, the kinase inhibitor is a CDK4 inhibitor selected from aloisine A; flavopiridol or HMR-1275, 2-(2-chlorophenyl)-5,7-dihydroxy-8-[(3S,4R)-3-hydroxy-1-methyl-4-piperidinyl]-4-chromenone; crizotinib (PF-02341066; 2-(2-Chlorophenyl)-5,7-dihydroxy-8-[(2R,3S)-2-(hydroxymethyl)-1-methyl-3-pyrrolidinyl]-4H-1-benzopyran-4-one, hydrochloride (P276-00); 1-methyl-5-[[2-[5-(trifluoromethyl)-1H-imidazol-2-yl]-4-pyridinyl]oxy]-N-[4-(trifluoromethyl)phenyl]-1H-benzimidazol-2-amine (RAF265); indisulam (E7070); roscovitine (CYC202); palbociclib (PD0332991); dinaciclib (SCH727965); N-[5-[[(5-tert-butyloxazol-2-yl)methyl]thin]thiazol-2-yl]piperidine-4-carboxamide (BMS 387032); 4-[[9-chloro-7-(2,6-difluorophenyl)-5H-pyrimido[5,4-d] [2]benzazepin-2-yl]amino]-benzoic acid (MLN8054); 5-[3-(4,6-difluoro-1H-benzimidazol-2-yl)-1H-indazol-5-yl]-N-ethyl-4-methyl-3-pyridinemethanamine (AG-024322); 4-(2,6-dichlorobenzoylamino)-1H-pyrazole-3-carboxylic acid N-(piperidin-4-yl)amide (AT7519); 4-[2-methyl-1-(1-methylethyl)-1H-imidazol-5-yl]-N-[4-(methylsulfonyl)phenyl]-2-pyrimidinamine (AZD5438); and XL281 (BMS908662).

[0981] In one embodiment of the methods or uses described herein, the kinase inhibitor is a CDK4 inhibitor, e.g., palbociclib (PD0332991), and the palbociclib is administered at a dose of about 50 mg, 60 mg, 70 mg, 75 mg, 80 mg, 90 mg, 100 mg, 105 mg, 110 mg, 115 mg, 120 mg, 125 mg, 130 mg, 135 mg (e.g., 75 mg, 100 mg or 125 mg) daily for a period of time, e.g., daily for 14-21 days of a 28 day cycle, or daily for 7-12 days of a 21 day cycle. In one embodiment, 1, 2, 3, 4, 5, 6, 7, 8, 9, 10, 11, 12 or more cycles of palbociclib are administered.

[0982] In one embodiment of the methods or uses described herein, the kinase inhibitor is a BTK inhibitor selected from ibrutinib (PCI-32765); GDC-0834; RN-486; CGI-560; CGI-1764; HM-71224; CC-292; ONO-4059; CNX-774; and LFM-A13. In one embodiment, the BTK inhibitor does not reduce or inhibit the kinase activity of interleukin-2-inducible kinase (ITK), and is selected from GDC-0834; RN-486; CGI-560; CGI-1764; HM-71224; CC-292; ONO-4059; CNX-774; and LFM-A13.

[0983] In one embodiment of the methods or uses described herein, the kinase inhibitor is a BTK inhibitor, e.g., ibrutinib (PCI-32765), and the ibrutinib is administered at a dose of about 250 mg, 300 mg, 350 mg, 400 mg, 420 mg, 440 mg, 460 mg, 480 mg, 500 mg, 520 mg, 540 mg, 560 mg, 580 mg, 600 mg (e.g., 250 mg, 420 mg or 560 mg) daily for a period of time, e.g., daily for 21 day cycle, or daily for 28 day cycle. In one embodiment, 1, 2, 3, 4, 5, 6, 7, 8, 9, 10, 11, 12 or more cycles of ibrutinib are administered.

[0984] In one embodiment of the methods or uses described herein, the kinase inhibitor is a BTK inhibitor that does not inhibit the kinase activity of ITK, e.g., RN-486, and RN-486 is administered at a dose of about 100 mg, 110 mg, 120 mg, 130 mg, 140 mg, 150 mg, 160 mg, 170 mg, 180 mg, 190 mg, 200 mg, 210 mg, 220 mg, 230 mg, 240 mg, 250 mg (e.g., 150 mg, 200 mg or 250 mg) daily for a period of time, e.g., daily a 28 day cycle. In one embodiment, 1, 2, 3, 4, 5, 6, 7, or more cycles of RN-486 are administered.

[0985] In one embodiment of the methods or uses described herein, the kinase inhibitor is an mTOR inhibitor selected from temsirolimus; ridaforolimus (1R,2R,4S)-4-[(2R)-2 [(1R,9S,12S,15R,16E,18R,19R,21R, 23S,24E,26E,28Z,30S,32S,35R)-1,18-dihydroxy-19,30-dimethoxy-15,17,21,23, 29,35-hexamethyl-2,3,10,14,20-pentaoxo-11,36-dioxa-4-azatricyclo[30.3.1.0^{4.9}] hexatriaconta-16,24,26,28-tetraen-12-yl]propyl]-2-methoxycyclohexyl dimethylphosphinate, also known as AP23573 and MK8669; everolimus (RAD001); rapamycin (AY22989); simapimod; (5-{2,4-bis[(3S)-3-methylmorpholin-4-yl]pyrido[2,3-d]pyrimidin-7-yl}-2-methoxyphenyl)methanol (AZD8055); 2-amino-8-[trans-4-(2-hydroxyethoxy)cyclohexyl]-6-(6-methoxy-3-pyridinyl)-4-methyl-pyrido[2,3-d]pyrimidin-7(8H)-one (PF04691502); and N²-[1,4-dioxo-4-[[4-(4-oxo-8-phenyl-4H-1-benzopyran-2-yl)morpholinium-4-yl]methoxy]butyl]-L-arginylglycyl-L-α-aspartylL-serine- (SEQ ID NO: 112), inner salt (SF1126); and XL765.

[0986] In one embodiment of the methods or uses described herein, the kinase inhibitor is an mTOR inhibitor, e.g., rapamycin, and the rapamycin is administered at a dose of about 3 mg, 4 mg, 5 mg, 6 mg, 7 mg, 8 mg, 9 mg, 10 mg (e.g., 6 mg) daily for a period of time, e.g., daily for 21 day cycle, or daily for 28 day cycle. In one embodiment, 1, 2, 3, 4, 5, 6, 7, 8, 9, 10, 11, 12 or more cycles of rapamycin are administered. In one embodiment, the kinase inhibitor is an mTOR inhibitor, e.g., everolimus and the everolimus is administered at a dose of about 2 mg, 2.5 mg, 3 mg, 4 mg, 5 mg, 6 mg, 7 mg, 8 mg, 9 mg, 10 mg, 11 mg, 12 mg, 13 mg, 14 mg, 15 mg (e.g., 10 mg) daily for a period of time, e.g., daily for 28 day cycle. In one embodiment, 1, 2, 3, 4, 5, 6, 7, 8, 9, 10, 11, 12 or more cycles of everolimus are administered.

[0987] In one embodiment of the methods or uses described herein, the kinase inhibitor is an MNK inhibitor selected from CGP052088; 4-amino-3-(p-fluorophenylamino)-pyrazolo [3,4-d] pyrimidine (CGP57380); cercosporamide; ETC-1780445-2; and 4-amino-5-(4-fluoroanilino)-pyrazolo [3,4-d] pyrimidine.

[0988] In one embodiment of the methods or uses described herein, the kinase inhibitor is a dual phosphatidylinositol 3-kinase (PI3K) and mTOR inhibitor selected from 2-Amino-8-[trans-4-(2-hydroxyethoxy)cyclohexyl]-6-(6-methoxy-3-pyridinyl)-4-methyl-pyrido [2, 3-d]pyrimidin-7(8H)-one (PF-04691502); N-[4-[[4-(Dimethylamino)-1-piperidinyl]carbonyl]phenyl]-N′-[4-(4,6-di-4-morpholinyl-1,3,5-triazin-2-yl)phenyl]urea (PF-05212384, PKI-587); 2-Methyl-2-{4-[3-methyl-2-oxo-8-(quinolin-3-yl)-2,3-dihydro-1H-imidazo[4,5-c]quinolin-1-yl]phenyl}propanenitrile (BEZ-235); apitolisib (GDC-0980, RG7422); 2,4-Difluoro-N-{2-(methyloxy)-5-[4-(4-pyridazinyl)-6-quinolinyl]-3-pyridinyl}benzenesulfonamide (GS K2126458); 8-(6-methoxypyridin-3-yl)-3-methyl-1-(4-(piperazin-1-yl)-3-(trifluoromethyl)phenyl)-1H-imidazo[4,5-c]quinolin-2(3H)-one Maleic acid (NVP-BGT226); 3-[4-(4-Morpholinylpyrido[3′,2′:4,5]furo[3,2-d]pyrimidin-2-yl]phenol (PI-103); 5-(9-isopropyl-8-methyl-2-morpholino-9H-purin-6-yl)pyrimidin-2-amine (VS-5584, SB2343); and N-[2-[(3,5-Dimethoxyphenyl)amino]quinoxalin-3-yl]-4-[(4-methyl-3-methoxyphenyl)carbonyl]aminophenylsulfonamide (XL765).

[0989] In one embodiment of the methods or uses described herein, an anti-target CAR expressing immune effector cell described herein is administered to a subject in combination with a protein tyrosine phosphatase inhibitor, e.g., a protein tyrosine phosphatase inhibitor described herein. In one embodiment, the protein tyrosine phosphatase inhibitor is an SHP-1 inhibitor, e.g., an SHP-1 inhibitor described herein, such as, e.g., sodium stibogluconate. In one embodiment, the protein tyrosine phosphatase inhibitor is an SHP-2 inhibitor.

[0990] In one embodiment of the methods or uses described herein, the anti-target CAR molecule is administered in combination with another agent, and the agent is a cytokine. The cytokine can be, e.g., IL-7, IL-15, IL-21, or a combination thereof. In another embodiment, the CAR molecule is administered in combination with a checkpoint inhibitor, e.g., a checkpoint inhibitor described herein. For example, in one embodiment, the check point inhibitor inhibits an inhibitory molecule selected from PD-1, PD-L1, CTLA-4, TIM-3, CEACAM (e.g., CEACAM-1, CEACAM-3 and/or CEACAM-5), LAG-3, VISTA, BTLA, TIGIT, LAIR1, CD160, 2B4 and TGF beta.

[0991] In further aspects, an anti-target CAR-expressing cell described herein may be used in a treatment regimen in combination with surgery, chemotherapy, radiation, immunosuppressive agents, such as cyclosporin, azathioprine, methotrexate, mycophenolate, and FK506, antibodies, or other immunoablative agents such as CAMPATH, anti-CD3 antibodies or other antibody therapies, cytoxin, fludarabine, cyclosporin, FK506, rapamycin, mycophenolic acid, steroids, FR901228, cytokines, and irradiation. peptide vaccine, such as that described in Izumoto et al. 2008 J Neurosurg 108:963-971.

[0992] In one embodiment, am anti-target CAR-expressing cell described herein can be used in combination with a chemotherapeutic agent. Exemplary chemotherapeutic agents include an anthracycline (e.g., doxorubicin (e.g., liposomal doxorubicin)). a vinca alkaloid (e.g., vinblastine, vincristine, vindesine, vinorelbine), an alkylating agent (e.g., cyclophosphamide, decarbazine, melphalan, ifosfamide, temozolomide), an immune cell antibody (e.g., alemtuzamab, gemtuzumab, rituximab, ofatumumab, tositumomab, brentuximab), an antimetabolite (including, e.g., folic acid antagonists, pyrimidine analogs, purine analogs and adenosine deaminase inhibitors (e.g., fludarabine)), an mTOR inhibitor, a TNFR glucocorticoid induced TNFR related protein (GITR) agonist, a proteasome inhibitor (e.g., aclacinomycin A, gliotoxin or bortezomib), an immunomodulator such as thalidomide or a thalidomide derivative (e.g., lenalidomide).

[0993] General Chemotherapeutic agents considered for use in combination therapies include anastrozole (Arimidex®), bicalutamide (Casodex®), bleomycin sulfate (Blenoxane®), busulfan (Myleran®), busulfan injection (Busulfex®), capecitabine (Xeloda®), N4-pentoxycarbonyl-5-deoxy-5-fluorocytidine, carboplatin (Paraplatin®), carmustine (BiCNU®), chlorambucil (Leukeran®), cisplatin (Platinol®), cladribine (Leustatin®), cyclophosphamide (Cytoxan® or Neosar®), cytarabine, cytosine arabinoside (Cytosar-U®), cytarabine liposome injection (DepoCyt®), dacarbazine (DTIC-Dome®), dactinomycin (Actinomycin D, Cosmegan), daunorubicin hydrochloride (Cerubidine®), daunorubicin citrate liposome injection (DaunoXome®), dexamethasone, docetaxel (Taxotere®), doxorubicin hydrochloride (Adriamycin®, Rubex®), etoposide (Vepesid®), fludarabine phosphate (Fludara®), 5-fluorouracil (Adrucil®, Efudex®), flutamide (Eulexin®), tezacitibine, Gemcitabine (difluorodeoxycitidine), hydroxyurea (Hydrea®), Idarubicin (Idamycin®), ifosfamide (IFEX®), irinotecan (Camptosar®), L-asparaginase (ELSPAR®), leucovorin calcium, melphalan (Alkeran®), 6-mercaptopurine (Purinethol®), methotrexate (Folex®), mitoxantrone (Novantrone®), mylotarg, paclitaxel (Taxol®), phoenix (Yttrium90/MX-DTPA), pentostatin, polifeprosan 20 with carmustine implant (Gliadel®), tamoxifen citrate (Nolvadex®), teniposide (Vumon®), 6-thioguanine, thiotepa, tirapazamine (Tirazone®), topotecan hydrochloride for injection (Hycamptin®), vinblastine (Velban®), vincristine (Oncovin®), and vinorelbine (Navelbine®).

[0994] Exemplary alkylating agents include, without limitation, nitrogen mustards, ethylenimine derivatives, alkyl sulfonates, nitrosoureas and triazenes): uracil mustard (Aminouracil Mustard®, Chlorethaminacil®, Demethyldopan®, Desmethyldopan®, Haemanthamine®, Nordopan®, Uracil Nitrogen Mustard®, Uracillost®, Uracilmostaza®, Uramustin®, Uramustine®), chlormethine (Mustargen®), cyclophosphamide (Cytoxan®, Neosar®, Clafen®, Endoxan®, Procytox®, Revimmune™), ifosfamide (Mitoxana®), melphalan (Alkeran®), Chlorambucil (Leukeran®), pipobroman (Amedel®, Vercyte®), triethylenemelamine (Hemel®, Hexalen®, Hexastat®), triethylenethiophosphoramine, Temozolomide (Temodar®), thiotepa (Thioplex®), busulfan (Busilvex®, Myleran®), carmustine (BiCNU®), lomustine (CeeNU®), streptozocin (Zanosar®), and Dacarbazine (DTIC-Dome®). Additional exemplary alkylating agents include, without limitation, Oxaliplatin (Eloxatin®); Temozolomide (Temodar® and Temodal®); Dactinomycin (also known as actinomycin-D, Cosmegen®); Melphalan (also known as L-PAM, L-sarcolysin, and phenylalanine mustard, Alkeran®); Altretamine (also known as hexamethylmelamine (HMM), Hexalen®); Carmustine (BiCNU®); Bendamustine (Treanda®); Busulfan (Busulfex® and Myleran®); Carboplatin (Paraplatin®); Lomustine (also known as CCNU, CeeNU®); Cisplatin (also known as CDDP, Platinol® and Platinol®-AQ); Chlorambucil (Leukeran®); Cyclophosphamide (Cytoxan® and Neosar®); Dacarbazine (also known as DTIC, DIC and imidazole carboxamide, DTIC-Dome®); Altretamine (also known as hexamethylmelamine (HMM), Hexalen®); Ifosfamide (Ifex®); Prednumustine; Procarbazine (Matulane®); Mechlorethamine (also known as nitrogen mustard, mustine and mechloroethamine hydrochloride, Mustargen®); Streptozocin (Zanosar®); Thiotepa (also known as thiophosphoamide, TESPA and TSPA, Thioplex®); Cyclophosphamide (Endoxan®, Cytoxan®, Neosar®, Procytox®, Revimmune®); and Bendamustine HCl (Treanda®).

[0995] In embodiments, an anti-target CAR-expressing cell described herein is administered to a subject in combination with fludarabine, cyclophosphamide, and/or rituximab. In embodiments, an anti-target CAR-expressing cell described herein is administered to a subject in combination with fludarabine, cyclophosphamide, and rituximab (FCR). In embodiments, the subject has CLL. For example, the subject has a deletion in the short arm of chromosome 17 (del(17p), e.g., in a leukemic cell). In other examples, the subject does not have a del(17p). In embodiments, the subject comprises a leukemic cell comprising a mutation in the immunoglobulin heavy-chain variable-region (IgV_{H}) gene. In other embodiments, the subject does not comprise a leukemic cell comprising a mutation in the immunoglobulin heavy-chain variable-region (IgV_{H}) gene. In embodiments, the fludarabine is administered at a dosage of about 10-50 mg/m² (e.g., about 10-15, 15-20, 20-25, 25-30, 30-35, 35-40, 40-45, or 45-50 mg/m²), e.g., intravenously. In embodiments, the cyclophosphamide is administered at a dosage of about 200-300 mg/m² (e.g., about 200-225, 225-250, 250-275, or 275-300 mg/m²), e.g., intravenously. In embodiments, the rituximab is administered at a dosage of about 400-600 mg/m2 (e.g., 400-450, 450-500, 500-550, or 550-600 mg/m²), e.g., intravenously.

[0996] In embodiments, an anti-target CAR-expressing cell described herein is administered to a subject in combination with bendamustine and rituximab. In embodiments, the subject has CLL. For example, the subject has a deletion in the short arm of chromosome 17 (del(17p), e.g., in a leukemic cell). In other examples, the subject does not have a del(17p). In embodiments, the subject comprises a leukemic cell comprising a mutation in the immunoglobulin heavy-chain variable-region (IgV_{H}) gene. In other embodiments, the subject does not comprise a leukemic cell comprising a mutation in the immunoglobulin heavy-chain variable-region (IgV_{H}) gene. In embodiments, the bendamustine is administered at a dosage of about 70-110 mg/m2 (e.g., 70-80, 80-90, 90-100, or 100-110 mg/m2), e.g., intravenously. In embodiments, the rituximab is administered at a dosage of about 400-600 mg/m2 (e.g., 400-450, 450-500, 500-550, or 550-600 mg/m²), e.g., intravenously.

[0997] In embodiments, an anti-target CAR-expressing cell described herein is administered to a subject in combination with rituximab, cyclophosphamide, doxorubicine, vincristine, and/or a corticosteroid (e.g., prednisone). In embodiments, a CAR-expressing cell described herein is administered to a subject in combination with rituximab, cyclophosphamide, doxorubicine, vincristine, and prednisone (R-CHOP). In embodiments, the subject has diffuse large B-cell lymphoma (DLBCL). In embodiments, the subject has nonbulky limited-stage DLBCL (e.g., comprises a tumor having a size/diameter of less than 7 cm). In embodiments, the subject is treated with radiation in combination with the R-CHOP. For example, the subject is administered R-CHOP (e.g., 1-6 cycles, e.g., 1, 2, 3, 4, 5, or 6 cycles of R-CHOP), followed by radiation. In some cases, the subject is administered R-CHOP (e.g., 1-6 cycles, e.g., 1, 2, 3, 4, 5, or 6 cycles of R-CHOP) following radiation.

[0998] In embodiments, an anti-target CAR-expressing cell described herein is administered to a subject in combination with etoposide, prednisone, vincristine, cyclophosphamide, doxorubicin, and/or rituximab. In embodiments, an anti-target CAR-expressing cell described herein is administered to a subject in combination with etoposide, prednisone, vincristine, cyclophosphamide, doxorubicin, and rituximab (EPOCH-R). In embodiments, an anti-target CAR-expressing cell described herein is administered to a subject in combination with dose-adjusted EPOCH-R (DA-EPOCH-R). In embodiments, the subject has a B cell lymphoma, e.g., a Myc-rearranged aggressive B cell lymphoma.

[0999] In embodiments, an anti-target CAR-expressing cell described herein is administered to a subject in combination with rituximab and/or lenalidomide. Lenalidomide ((RS)-3-(4-Amino-1-oxo 1,3-dihydro-2H-isoindol-2-yl)piperidine-2,6-dione) is an immunomodulator. In embodiments, a CAR-expressing cell described herein is administered to a subject in combination with rituximab and lenalidomide. In embodiments, the subject has follicular lymphoma (FL) or mantle cell lymphoma (MCL). In embodiments, the subject has FL and has not previously been treated with a cancer therapy. In embodiments, lenalidomide is administered at a dosage of about 10-20 mg (e.g., 10-15 or 15-20 mg), e.g., daily. In embodiments, rituximab is administered at a dosage of about 350-550 mg/m² (e.g., 350-375, 375-400, 400-425, 425-450, 450-475, or 475-500 mg/m²), e.g., intravenously.

[1000] Exemplary mTOR inhibitors include, e.g., temsirolimus; ridaforolimus (formally known as deferolimus, (1R,2R,4S)-4-[(2R)-2 [(1R,9S,12S,15R,16E,18R,19R,21R, 23S,24E,26E,28Z,30S,32S,35R)-1,18-dihydroxy-19,30-dimethoxy-15,17,21,23, 29,35-hexamethyl-2,3,10,14,20-pentaoxo-11,36-dioxa-4-azatricyclo[30.3.1.0^{4.9}] hexatriaconta-16,24,26,28-tetraen-12-yl]propyl]-2-methoxycyclohexyl dimethylphosphinate, also known as AP23573 and MK8669, and described in PCT Publication No. WO 03/064383); everolimus (Afinitor® or RAD001); rapamycin (AY22989, Sirolimus®); simapimod (CAS 164301-51-3); emsirolimus, (5-{2,4-Bis[(3S)-3-methylmorpholin-4-yl]pyrido[2,3-d]pyrimidin-7-yl}-2-methoxyphenyl)methanol (AZD8055); 2-Amino-8-[trans-4-(2-hydroxyethoxy)cyclohexyl]-6-(6-methoxy-3-pyridinyl)-4-methyl-pyrido [2, 3-d]pyrimidin-7(8H)-one (PF04691502, CAS 1013101-36-4); and N²-[1,4-dioxo-4-[[4-(4-oxo-8-phenyl-4H-1-benzopyran-2-yl)morpholinium-4-yl]methoxy]butyl]-L-arginylglycyl-L-α-aspartylL-serine-(SEQ ID NO: 112), inner salt (SF1126, CAS 936487-67-1), and XL765.

[1001] Exemplary immunomodulators include, e.g., afutuzumab (available from Roche®); pegfilgrastim (Neulasta®); lenalidomide (CC-5013, Revlimid®); thalidomide (Thalomid®), actimid (CC4047); and IRX-2 (mixture of human cytokines including interleukin 1, interleukin 2, and interferon γ, CAS 951209-71-5, available from IRX Therapeutics).

[1002] Exemplary anthracyclines include, e.g., doxorubicin (Adriamycin® and Rubex®); bleomycin (Lenoxane®); daunorubicin (dauorubicin hydrochloride, daunomycin, and rubidomycin hydrochloride, Cerubidine®); daunorubicin liposomal (daunorubicin citrate liposome, DaunoXome®); mitoxantrone (DHAD, Novantrone®); epirubicin (Ellence™); idarubicin (Idamycin®, Idamycin PFS®); mitomycin C (Mutamycin®); geldanamycin; herbimycin; ravidomycin; and desacetylravidomycin.

[1003] Exemplary vinca alkaloids include, e.g., vinorelbine tartrate (Navelbine®), Vincristine (Oncovin®), and Vindesine (Eldisine®)); vinblastine (also known as vinblastine sulfate, vincaleukoblastine and VLB, Alkaban-AQ® and Velban®); and vinorelbine (Navelbine®).

[1004] Exemplary proteosome inhibitors include bortezomib (Velcade®); carfilzomib (PX-171-007, (S)-4-Methyl-N-((S)-1-(((S)-4-methyl-1-((R)-2-methyloxiran-2-yl)-1-oxopentan-2-yl)amino)-1-oxo-3-phenylpropan-2-yl)-2-((S)-2-(2-morpholinoacetamido)-4-phenylbutanamido)-pentanamide); marizomib (NPI-0052); ixazomib citrate (MLN-9708); delanzomib (CEP-18770); and O-Methyl-N-[(2-methyl-5-thiazolyl)carbonyl]-L-seryl-O-methyl-N-[(1S)-2-[(2R)-2-methyl-2-oxiranyl]-2-oxo-1-(phenylmethyl)ethyl]-L-serinamide (ONX-0912).

[1005] In embodiments, an anti-target CAR-expressing cell described herein is administered to a subject in combination with brentuximab. Brentuximab is an antibody-drug conjugate of anti-CD30 antibody and monomethyl auristatin E. In embodiments, the subject has Hodgkin's lymphoma (HL), e.g., relapsed or refractory HL. In embodiments, the subject comprises CD30+HL. In embodiments, the subject has undergone an autologous stem cell transplant (ASCT). In embodiments, the subject has not undergone an ASCT. In embodiments, brentuximab is administered at a dosage of about 1-3 mg/kg (e.g., about 1-1.5, 1.5-2, 2-2.5, or 2.5-3 mg/kg), e.g., intravenously, e.g., every 3 weeks.

[1006] In embodiments, an anti-target CAR-expressing cell described herein is administered to a subject in combination with brentuximab and dacarbazine or in combination with brentuximab and bendamustine. Dacarbazine is an alkylating agent with a chemical name of 5-(3,3-Dimethyl-1-triazenyl)imidazole-4-carboxamide. Bendamustine is an alkylating agent with a chemical name of 445-[Bis(2-chloroethyl)aminol-1-methylbenzimidazol-2-yl]butanoic acid. In embodiments, the subject has Hodgkin's lymphoma (HL). In embodiments, the subject has not previously been treated with a cancer therapy. In embodiments, the subject is at least 60 years of age, e.g., 60, 65, 70, 75, 80, 85, or older. In embodiments, dacarbazine is administered at a dosage of about 300-450 mg/m² (e.g., about 300-325, 325-350, 350-375, 375-400, 400-425, or 425-450 mg/m²), e.g., intravenously. In embodiments, bendamustine is administered at a dosage of about 75-125 mg/m2 (e.g., 75-100 or 100-125 mg/m², e.g., about 90 mg/m²), e.g., intravenously. In embodiments, brentuximab is administered at a dosage of about 1-3 mg/kg (e.g., about 1-1.5, 1.5-2, 2-2.5, or 2.5-3 mg/kg), e.g., intravenously, e.g., every 3 weeks.

[1007] In some embodiments, an anti-target CAR-expressing cell described herein is administered to a subject in combination with a CD20 inhibitor, e.g., an anti-CD20 antibody (e.g., an anti-CD20 mono- or bispecific antibody) or a fragment thereof. Exemplary anti-CD20 antibodies include but are not limited to rituximab, ofatumumab, ocrelizumab, veltuzumab, obinutuzumab, TRU-015 (Trubion Pharmaceuticals), ocaratuzumab, and Pro131921 (Genentech). See, e.g., Lim et al. Haematologica. 95.1(2010):135-43.

[1008] In some embodiments, the anti-CD20 antibody comprises rituximab. Rituximab is a chimeric mouse/human monoclonal antibody IgG1 kappa that binds to CD20 and causes cytolysis of a CD20 expressing cell, e.g., as described in www.accessdata.fda.gov/drugsatfda_docs/label/2010/103705s53111b1.pdf. In embodiments, a CAR-expressing cell described herein is administered to a subject in combination with rituximab. In embodiments, the subject has CLL or SLL.

[1009] In some embodiments, rituximab is administered intravenously, e.g., as an intravenous infusion. For example, each infusion provides about 500-2000 mg (e.g., about 500-550, 550-600, 600-650, 650-700, 700-750, 750-800, 800-850, 850-900, 900-950, 950-1000, 1000-1100, 1100-1200, 1200-1300, 1300-1400, 1400-1500, 1500-1600, 1600-1700, 1700-1800, 1800-1900, or 1900-2000 mg) of rituximab. In some embodiments, rituximab is administered at a dose of 150 mg/m² to 750 mg/m², e.g., about 150-175 mg/m², 175-200 mg/m², 200-225 mg/m², 225-250 mg/m², 250-300 mg/m², 300-325 mg/m², 325-350 mg/m², 350-375 mg/m², 375-400 mg/m², 400-425 mg/m², 425-450 mg/m², 450-475 mg/m², 475-500 mg/m², 500-525 mg/m², 525-550 mg/m², 550-575 mg/m², 575-600 mg/m², 600-625 mg/m², 625-650 mg/m², 650-675 mg/m², or 675-700 mg/m², where m² indicates the body surface area of the subject. In some embodiments, rituximab is administered at a dosing interval of at least 4 days, e.g., 4, 7, 14, 21, 28, 35 days, or more. For example, rituximab is administered at a dosing interval of at least 0.5 weeks, e.g., 0.5, 1, 2, 3, 4, 5, 6, 7, 8 weeks, or more. In some embodiments, rituximab is administered at a dose and dosing interval described herein for a period of time, e.g., at least 2 weeks, e.g., at least 2, 3, 4, 5, 6, 7, 8, 9, 10, 11, 12, 13, 14, 15, 16, 17, 18, 19, 20 weeks, or greater. For example, rituximab is administered at a dose and dosing interval described herein for a total of at least 4 doses per treatment cycle (e.g., at least 4, 5, 6, 7, 8, 9, 10, 11, 12, 13, 14, 15, 16, or more doses per treatment cycle).

[1010] In some embodiments, the anti-CD20 antibody comprises ofatumumab. Ofatumumab is an anti-CD20 IgG1κ human monoclonal antibody with a molecular weight of approximately 149 kDa. For example, ofatumumab is generated using transgenic mouse and hybridoma technology and is expressed and purified from a recombinant murine cell line (NSO). See, e.g., www.accessdata.fda.gov/drugsatfda_docs/label/2009/1253261b1.pdf; and Clinical Trial Identifier number NCT01363128, NCT01515176, NCT01626352, and NCT01397591. In embodiments, a CAR-expressing cell described herein is administered to a subject in combination with ofatumumab. In embodiments, the subject has CLL or SLL.

[1011] In some embodiments, ofatumumab is administered as an intravenous infusion. For example, each infusion provides about 150-3000 mg (e.g., about 150-200, 200-250, 250-300, 300-350, 350-400, 400-450, 450-500, 500-550, 550-600, 600-650, 650-700, 700-750, 750-800, 800-850, 850-900, 900-950, 950-1000, 1000-1200, 1200-1400, 1400-1600, 1600-1800, 1800-2000, 2000-2200, 2200-2400, 2400-2600, 2600-2800, or 2800-3000 mg) of ofatumumab. In embodiments, ofatumumab is administered at a starting dosage of about 300 mg, followed by 2000 mg, e.g., for about 11 doses, e.g., for 24 weeks. In some embodiments, ofatumumab is administered at a dosing interval of at least 4 days, e.g., 4, 7, 14, 21, 28, 35 days, or more. For example, ofatumumab is administered at a dosing interval of at least 1 week, e.g., 1, 2, 3, 4, 5, 6, 7, 8, 9, 10, 11, 12, 24, 26, 28, 20, 22, 24, 26, 28, 30 weeks, or more. In some embodiments, ofatumumab is administered at a dose and dosing interval described herein for a period of time, e.g., at least 1 week, e.g., 1, 2, 3, 4, 5, 6, 7, 8, 9, 10, 11, 12, 13, 14, 15, 16, 17, 18, 19, 20, 22, 24, 26, 28, 30, 40, 50, 60 weeks or greater, or 1, 2, 3, 4, 5, 6, 7, 8, 9, 10, 11, 12 months or greater, or 1, 2, 3, 4, 5 years or greater. For example, ofatumumab is administered at a dose and dosing interval described herein for a total of at least 2 doses per treatment cycle (e.g., at least 2, 3, 4, 5, 6, 7, 8, 9, 10, 11, 12, 13, 14, 15, 16, 18, 20, or more doses per treatment cycle).

[1012] In some cases, the anti-CD20 antibody comprises ocrelizumab. Ocrelizumab is a humanized anti-CD20 monoclonal antibody, e.g., as described in Clinical Trials Identifier Nos. NCT00077870, NCT01412333, NCT00779220, NCT00673920, NCT01194570, and Kappos et al. Lancet. 19.378(2011):1779-87.

[1013] In some cases, the anti-CD20 antibody comprises veltuzumab. Veltuzumab is a humanized monoclonal antibody against CD20. See, e.g., Clinical Trial Identifier No. NCT00547066, NCT00546793, NCT01101581, and Goldenberg et al. Leuk Lymphoma. 51(5)(2010):747-55.

[1014] In some cases, the anti-CD20 antibody comprises GA101. GA101 (also called obinutuzumab or RO5072759) is a humanized and glyco-engineered anti-CD20 monoclonal antibody. See, e.g., Robak. Curr. Opin. Investig. Drugs. 10.6(2009):588-96; Clinical Trial Identifier Numbers: NCT01995669, NCT01889797, NCT02229422, and NCT01414205; and www.accessdata.fda.gov/drugsatfda_docs/label/2013/125486s0001b1.pdf.

[1015] In some cases, the anti-CD20 antibody comprises AME-133v. AME-133v (also called LY2469298 or ocaratuzumab) is a humanized IgG1 monoclonal antibody against CD20 with increased affinity for the FcγRIIIa receptor and an enhanced antibody dependent cellular cytotoxicity (ADCC) activity compared with rituximab. See, e.g., Robak et al. BioDrugs 25.1(2011):13-25; and Forero-Torres et al. Clin Cancer Res. 18.5(2012):1395-403.

[1016] In some cases, the anti-CD20 antibody comprises PRO131921. PRO131921 is a humanized anti-CD20 monoclonal antibody engineered to have better binding to FcγRIIIa and enhanced ADCC compared with rituximab. See, e.g., Robak et al. BioDrugs 25.1(2011):13-25; and Casulo et al. Clin Immunol. 154.1(2014):37-46; and Clinical Trial Identifier No. NCT00452127.

[1017] In some cases, the anti-CD20 antibody comprises TRU-015. TRU-015 is an anti-CD20 fusion protein derived from domains of an antibody against CD20. TRU-015 is smaller than monoclonal antibodies, but retains Fc-mediated effector functions. See, e.g., Robak et al. BioDrugs 25.1(2011):13-25. TRU-015 contains an anti-CD20 single-chain variable fragment (scFv) linked to human IgG1 hinge, CH2, and CH3 domains but lacks CH1 and CL domains.

[1018] In some embodiments, an anti-CD20 antibody described herein is conjugated or otherwise bound to a therapeutic agent, e.g., a chemotherapeutic agent (e.g., cytoxan, fludarabine, histone deacetylase inhibitor, demethylating agent, peptide vaccine, anti-tumor antibiotic, tyrosine kinase inhibitor, alkylating agent, anti-microtubule or anti-mitotic agent), anti-allergic agent, anti-nausea agent (or anti-emetic), pain reliever, or cytoprotective agent described herein.

[1019] In embodiments, an anti-target CAR-expressing cell described herein is administered to a subject in combination with a B-cell lymphoma 2 (BCL-2) inhibitor (e.g., venetoclax, also called ABT-199 or GDC-0199) and/or rituximab. In embodiments, an anti-target CAR-expressing cell described herein is administered to a subject in combination with venetoclax and rituximab. Venetoclax is a small molecule that inhibits the anti-apoptotic protein, BCL-2. The structure of venetoclax (4-(4-{[2-(4-chlorophenyl)-4,4-dimethylcyclohex-1-en-1-yl]methyl}piperazin-1-yl)-N-({3-nitro-4-[(tetrahydro-2H-pyran-4-ylmethyl)amino]phenyl}sulfonyl)-2-(1H-pyrrolo[2,3-b]pyridin-5-yloxy)benzamide) is shown below.

[chemical structure]

[1020] In embodiments, the subject has CLL. In embodiments, the subject has relapsed CLL, e.g., the subject has previously been administered a cancer therapy. In embodiments, venetoclax is administered at a dosage of about 15-600 mg (e.g., 15-20, 20-50, 50-75, 75-100, 100-200, 200-300, 300-400, 400-500, or 500-600 mg), e.g., daily. In embodiments, rituximab is administered at a dosage of about 350-550 mg/m2 (e.g., 350-375, 375-400, 400-425, 425-450, 450-475, or 475-500 mg/m2), e.g., intravenously, e.g., monthly

[1021] In an embodiment, cells expressing an anti-target CAR described herein are administered to a subject in combination with a molecule that decreases the Treg cell population. Methods that decrease the number of (e.g., deplete) Treg cells are known in the art and include, e.g., CD25 depletion, cyclophosphamide administration, modulating GITR function. Without wishing to be bound by theory, it is believed that reducing the number of Treg cells in a subject prior to apheresis or prior to administration of an anti-target CAR-expressing cell described herein reduces the number of unwanted immune cells (e.g., Tregs) in the tumor microenvironment and reduces the subject's risk of relapse. In one embodiment, cells expressing an anti-target CAR described herein are administered to a subject in combination with a molecule targeting GITR and/or modulating GITR functions, such as a GITR agonist and/or a GITR antibody that depletes regulatory T cells (Tregs). In embodiments, cells expressing an anti-target CAR described herein are administered to a subject in combination with cyclophosphamide. In one embodiment, the GITR binding molecules and/or molecules modulating GITR functions (e.g., GITR agonist and/or Treg depleting GITR antibodies) are administered prior to administration of the CAR-expressing cell. For example, in one embodiment, the GITR agonist can be administered prior to apheresis of the cells. In embodiments, cyclophosphamide is administered to the subject prior to administration (e.g., infusion or re-infusion) of the anti-target CAR-expressing cell or prior to apheresis of the cells. In embodiments, cyclophosphamide and an anti-GITR antibody are administered to the subject prior to administration (e.g., infusion or re-infusion) of the anti-target CAR-expressing cell or prior to apheresis of the cells. In one embodiment, the subject has cancer (e.g., a solid cancer or a hematological cancer such as ALL or CLL). In an embodiment, the subject has CLL. In embodiments, the subject has ALL. In embodiments, the subject has a solid cancer, e.g., a solid cancer described herein. Exemplary GITR agonists include, e.g., GITR fusion proteins and anti-GITR antibodies (e.g., bivalent anti-GITR antibodies) such as, e.g., a GITR fusion protein described in U.S. Pat. No. 6,111,090, European Patent No.: 090505B1, U.S. Pat. No. 8,586,023, PCT Publication Nos.: WO 2010/003118 and 2011/090754, or an anti-GITR antibody described, e.g., in U.S. Pat. No. 7,025,962, European Patent No.: 1947183B1, U.S. Pat. Nos. 7,812,135, 8,388,967, 8,591,886, European Patent No.: EP 1866339, PCT Publication No.: WO 2011/028683, PCT Publication No.: WO 2013/039954, PCT Publication No.: WO2005/007190, PCT Publication No.: WO 2007/133822, PCT Publication No.: WO2005/055808, PCT Publication No.: WO 99/40196, PCT Publication No.: WO 2001/03720, PCT Publication No.: WO99/20758, PCT Publication No.: WO2006/083289, PCT Publication No.: WO 2005/115451, U.S. Pat. No. 7,618,632, and PCT Publication No.: WO 2011/051726.

[1022] In one embodiment, an anti-target CAR expressing cell described herein is administered to a subject in combination with an mTOR inhibitor, e.g., an mTOR inhibitor described herein, e.g., a rapalog such as everolimus. In one embodiment, the mTOR inhibitor is administered prior to the anti-target CAR-expressing cell. For example, in one embodiment, the mTOR inhibitor can be administered prior to apheresis of the cells. In one embodiment, the subject has CLL.

[1023] In one embodiment, an anti-target CAR expressing cell described herein is administered to a subject in combination with a GITR agonist, e.g., a GITR agonist described herein. In one embodiment, the GITR agonist is administered prior to the anti-target CAR-expressing cell. For example, in one embodiment, the GITR agonist can be administered prior to apheresis of the cells. In one embodiment, the subject has CLL.

[1024] In one embodiment, an anti-target CAR-expressing cell described herein can be used in combination with a kinase inhibitor. In one embodiment, the kinase inhibitor is a CDK4 inhibitor, e.g., a CDK4 inhibitor described herein, e.g., a CD4/6 inhibitor, such as, e.g., 6-Acetyl-8-cyclopentyl-5-methyl-2-(5-piperazin-1-yl-pyridin-2-ylamino)-8H-pyrido[2,3-d]pyrimidin-7-one, hydrochloride (also referred to as palbociclib or PD0332991). In one embodiment, the kinase inhibitor is a BTK inhibitor, e.g., a BTK inhibitor described herein, such as, e.g., ibrutinib. In one embodiment, the kinase inhibitor is an mTOR inhibitor, e.g., an mTOR inhibitor described herein, such as, e.g., rapamycin, a rapamycin analog, OSI-027. The mTOR inhibitor can be, e.g., an mTORC1 inhibitor and/or an mTORC2 inhibitor, e.g., an mTORC1 inhibitor and/or mTORC2 inhibitor described herein. In one embodiment, the kinase inhibitor is a MNK inhibitor, e.g., a MNK inhibitor described herein, such as, e.g., 4-amino-5-(4-fluoroanilino)-pyrazolo [3,4-d] pyrimidine. The MNK inhibitor can be, e.g., a MNK1a, MNK1b, MNK2a and/or MNK2b inhibitor. In one embodiment, the kinase inhibitor is a dual PI3K/mTOR inhibitor described herein, such as, e.g., PF-04695102.

[1025] In one embodiment, the kinase inhibitor is a CDK4 inhibitor selected from aloisine A; flavopiridol or HMR-1275, 2-(2-chlorophenyl)-5,7-dihydroxy-8-[(3S,4R)-3-hydroxy-1-methyl-4-piperidinyl]-4-chromenone; crizotinib (PF-02341066; 2-(2-Chlorophenyl)-5,7-dihydroxy-8-[(2R,3S)-2-(hydroxymethyl)-1-methyl-3-pyrrolidinyl]-4H-1-benzopyran-4-one, hydrochloride (P276-00); 1-methyl-5-[[2-[5-(trifluoromethyl)-1H-imidazol-2-yl]-4-pyridinyl]oxy]-N-[4-(trifluoromethyl)phenyl]-1H-benzimidazol-2-amine (RAF265); indisulam (E7070); roscovitine (CYC202); palbociclib (PD0332991); dinaciclib (SCH727965); N-[5-[[(5-tert-butyloxazol-2-yl)methyl]thio]thiazol-2-yl]piperidine-4-carboxamide (BMS 387032); 4-[[9-chloro-7-(2,6-difluorophenyl)-5H-pyrimido[5,4-d][2]benzazepin-2-yl]amino]-benzoic acid (MLN8054); 5-[3-(4,6-difluoro-1H-benzimidazol-2-yl)-1H-indazol-5-yl]-N-ethyl-4-methyl-3-pyridinemethanamine (AG-024322); 4-(2,6-dichlorobenzoylamino)-1H-pyrazole-3-carboxylic acid N-(piperidin-4-yl)amide (AT7519); 4-[2-methyl-1-(1-methylethyl)-1H-imidazol-5-yl]-N-[4-(methylsulfonyl)phenyl]-2-pyrimidinamine (AZD5438); and XL281 (BMS908662).

[1026] In one embodiment, the kinase inhibitor is a CDK4 inhibitor, e.g., palbociclib (PD0332991), and the palbociclib is administered at a dose of about 50 mg, 60 mg, 70 mg, 75 mg, 80 mg, 90 mg, 100 mg, 105 mg, 110 mg, 115 mg, 120 mg, 125 mg, 130 mg, 135 mg (e.g., 75 mg, 100 mg or 125 mg) daily for a period of time, e.g., daily for 14-21 days of a 28 day cycle, or daily for 7-12 days of a 21 day cycle. In one embodiment, 1, 2, 3, 4, 5, 6, 7, 8, 9, 10, 11, 12 or more cycles of palbociclib are administered.

[1027] In embodiments, an anti-target CAR-expressing cell described herein is administered to a subject in combination with a cyclin-dependent kinase (CDK) 4 or 6 inhibitor, e.g., a CDK4 inhibitor or a CDK6 inhibitor described herein. In embodiments, a CAR-expressing cell described herein is administered to a subject in combination with a CDK4/6 inhibitor (e.g., an inhibitor that targets both CDK4 and CDK6), e.g., a CDK4/6 inhibitor described herein. In an embodiment, the subject has MCL. MCL is an aggressive cancer that is poorly responsive to currently available therapies, i.e., essentially incurable. In many cases of MCL, cyclin D1 (a regulator of CDK4/6) is expressed (e.g., due to chromosomal translocation involving immunoglobulin and Cyclin D1 genes) in MCL cells. Thus, without being bound by theory, it is thought that MCL cells are highly sensitive to CDK4/6 inhibition with high specificity (i.e., minimal effect on normal immune cells). CDK4/6 inhibitors alone have had some efficacy in treating MCL, but have only achieved partial remission with a high relapse rate. An exemplary CDK4/6 inhibitor is LEE011 (also called ribociclib), the structure of which is shown below.

[chemical structure]

[1028] Without being bound by theory, it is believed that administration of an anti-target CAR-expressing cell described herein with a CDK4/6 inhibitor (e.g., LEE011 or other CDK4/6 inhibitor described herein) can achieve higher responsiveness, e.g., with higher remission rates and/or lower relapse rates, e.g., compared to a CDK4/6 inhibitor alone.

[1029] In one embodiment, the kinase inhibitor is a BTK inhibitor selected from ibrutinib (PCI-32765); GDC-0834; RN-486; CGI-560; CGI-1764; HM-71224; CC-292; ONO-4059; CNX-774; and LFM-A13. In a preferred embodiment, the BTK inhibitor does not reduce or inhibit the kinase activity of interleukin-2-inducible kinase (ITK), and is selected from GDC-0834; RN-486; CGI-560; CGI-1764; HM-71224; CC-292; ONO-4059; CNX-774; and LFM-A13.

[1030] In one embodiment, the kinase inhibitor is a BTK inhibitor, e.g., ibrutinib (PCI-32765). In embodiments, an anti-target CAR-expressing cell described herein is administered to a subject in combination with a BTK inhibitor (e.g., ibrutinib). In embodiments, an anti-target CAR-expressing cell described herein is administered to a subject in combination with ibrutinib (also called PCI-32765). The structure of ibrutinib (1-[(3R)-3-[4-Amino-3-(4-phenoxyphenyl)-1H-pyrazolo [3,4-d]pyrimidin-1-yl]piperidin-1-yl]prop-2-en-1-one) is shown below.

[chemical structure]

[1031] In embodiments, the subject has CLL, mantle cell lymphoma (MCL), or small lymphocytic lymphoma (SLL). For example, the subject has a deletion in the short arm of chromosome 17 (del(17p), e.g., in a leukemic cell). In other examples, the subject does not have a del(17p). In embodiments, the subject has relapsed CLL or SLL, e.g., the subject has previously been administered a cancer therapy (e.g., previously been administered one, two, three, or four prior cancer therapies). In embodiments, the subject has refractory CLL or SLL. In other embodiments, the subject has follicular lymphoma, e.g., relapse or refractory follicular lymphoma. In some embodiments, ibrutinib is administered at a dosage of about 300-600 mg/day (e.g., about 300-350, 350-400, 400-450, 450-500, 500-550, or 550-600 mg/day, e.g., about 420 mg/day or about 560 mg/day), e.g., orally. In embodiments, the ibrutinib is administered at a dose of about 250 mg, 300 mg, 350 mg, 400 mg, 420 mg, 440 mg, 460 mg, 480 mg, 500 mg, 520 mg, 540 mg, 560 mg, 580 mg, 600 mg (e.g., 250 mg, 420 mg or 560 mg) daily for a period of time, e.g., daily for 21 day cycle, or daily for 28 day cycle. In one embodiment, 1, 2, 3, 4, 5, 6, 7, 8, 9, 10, 11, 12 or more cycles of ibrutinib are administered. Without being bound by theory, it is thought that the addition of ibrutinib enhances the T cell proliferative response and may shift T cells from a T-helper-2 (Th2) to T-helper-1 (Th1) phenotype. Th1 and Th2 are phenotypes of helper T cells, with Th1 versus Th2 directing different immune response pathways. A Th1 phenotype is associated with proinflammatory responses, e.g., for killing cells, such as intracellular pathogens/viruses or cancerous cells, or perpetuating autoimmune responses. A Th2 phenotype is associated with eosinophil accumulation and anti-inflammatory responses.

[1032] In one embodiment, the kinase inhibitor is an mTOR inhibitor selected from temsirolimus; ridaforolimus (1R,2R,4S)-4-[(2R)-2 [(1R,9S,12S,15R,16E,18R,19R,21R, 23S,24E,26E,28Z,30S,32S,35R)-1,18-dihydroxy-19,30-dimethoxy-15,17,21,23, 29,35-hexamethyl-2,3,10,14,20-pentaoxo-11,36-dioxa-4-azatricyclo[30.3.1.0^{4.9}] hexatriaconta-16,24,26,28-tetraen-12-yl]propyl]-2-methoxycyclohexyl dimethylphosphinate, also known as AP23573 and MK8669; everolimus (RAD001); rapamycin (AY22989); simapimod; (5-{2,4-bis[(3S)-3-methylmorpholin-4-yl]pyrido[2,3-d]pyrimidin-7-yl}-2-methoxyphenyl)methanol (AZD8055); 2-amino-8-[trans-4-(2-hydroxyethoxy)cyclohexyl]-6-(6-methoxy-3-pyridinyl)-4-methyl-pyrido[2,3-d]pyrimidin-7(8H)-one (PF04691502); and N²-[1,4-dioxo-4-[[4-(4-oxo-8-phenyl-4H-1-benzopyran-2-yl)morpholinium-4-yl]methoxy]butyl]-L-arginylglycyl-L-α-aspartylL-serine- (SEQ ID NO: 112), inner salt (SF1126); and XL765.

[1033] In one embodiment, the kinase inhibitor is an mTOR inhibitor, e.g., rapamycin, and the rapamycin is administered at a dose of about 3 mg, 4 mg, 5 mg, 6 mg, 7 mg, 8 mg, 9 mg, 10 mg (e.g., 6 mg) daily for a period of time, e.g., daily for 21 day cycle, or daily for 28 day cycle. In one embodiment, 1, 2, 3, 4, 5, 6, 7, 8, 9, 10, 11, 12 or more cycles of rapamycin are administered. In one embodiment, the kinase inhibitor is an mTOR inhibitor, e.g., everolimus and the everolimus is administered at a dose of about 2 mg, 2.5 mg, 3 mg, 4 mg, 5 mg, 6 mg, 7 mg, 8 mg, 9 mg, 10 mg, 11 mg, 12 mg, 13 mg, 14 mg, 15 mg (e.g., 10 mg) daily for a period of time, e.g., daily for 28 day cycle. In one embodiment, 1, 2, 3, 4, 5, 6, 7, 8, 9, 10, 11, 12 or more cycles of everolimus are administered.

[1034] In one embodiment, the kinase inhibitor is an MNK inhibitor selected from CGP052088; 4-amino-3-(p-fluorophenylamino)-pyrazolo [3,4-d] pyrimidine (CGP57380); cercosporamide; ETC-1780445-2; and 4-amino-5-(4-fluoroanilino)-pyrazolo [3,4-d]pyrimidine.

[1035] In embodiments, an anti-target CAR-expressing cell described herein is administered to a subject in combination with a phosphoinositide 3-kinase (PI3K) inhibitor (e.g., a PI3K inhibitor described herein, e.g., idelalisib or duvelisib) and/or rituximab. In embodiments, an anti-target CAR-expressing cell described herein is administered to a subject in combination with idelalisib and rituximab. In embodiments, an anti-target CAR-expressing cell described herein is administered to a subject in combination with duvelisib and rituximab. Idelalisib (also called GS-1101 or CAL-101; Gilead) is a small molecule that blocks the delta isoform of PI3K. The structure of idelalisib (5-Fluoro-3-phenyl-2-[(1S)-1-(7H-purin-6-ylamino)propyl]-4(3H)-quinazolinone) is shown below.

[chemical structure]

[1036] Duvelisib (also called IPI-145; Infinity Pharmaceuticals and Abbvie) is a small molecule that blocks PI3K-δ,γ. The structure of duvelisib (8-Chloro-2-phenyl-3-[(1S)-1-(9H-purin-6-ylamino)ethyl]-1(2H)-isoquinolinone) is shown below.

[chemical structure]

[1037] In embodiments, the subject has CLL. In embodiments, the subject has relapsed CLL, e.g., the subject has previously been administered a cancer therapy (e.g., previously been administered an anti-CD20 antibody or previously been administered ibrutinib). For example, the subject has a deletion in the short arm of chromosome 17 (del(17p), e.g., in a leukemic cell). In other examples, the subject does not have a del(17p). In embodiments, the subject comprises a leukemic cell comprising a mutation in the immunoglobulin heavy-chain variable-region (IgV_{H}) gene. In other embodiments, the subject does not comprise a leukemic cell comprising a mutation in the immunoglobulin heavy-chain variable-region (IgV_{H}) gene. In embodiments, the subject has a deletion in the long arm of chromosome 11 (del(11q)). In other embodiments, the subject does not have a del(11q). In embodiments, idelalisib is administered at a dosage of about 100-400 mg (e.g., 100-125, 125-150, 150-175, 175-200, 200-225, 225-250, 250-275, 275-300, 325-350, 350-375, or 375-400 mg), e.g., BID. In embodiments, duvelisib is administered at a dosage of about 15-100 mg (e.g., about 15-25, 25-50, 50-75, or 75-100 mg), e.g., twice a day. In embodiments, rituximab is administered at a dosage of about 350-550 mg/m² (e.g., 350-375, 375-400, 400-425, 425-450, 450-475, or 475-500 mg/m²), e.g., intravenously.

[1038] In one embodiment, the kinase inhibitor is a dual phosphatidylinositol 3-kinase (PI3K) and mTOR inhibitor selected from 2-Amino-8-[trans-4-(2-hydroxyethoxy)cyclohexyl]-6-(6-methoxy-3-pyridinyl)-4-methyl-pyrido[2,3-d]pyrimidin-7(8H)-one (PF-04691502); N-[4-[[4-(Dimethylamino)-1-piperidinyl]carbonyl]phenyl]-N-[4-(4,6-di-4-morpholinyl-1,3,5-triazin-2-yl)phenyl]urea (PF-05212384, PKI-587); 2-Methyl-2-{4-[3-methyl-2-oxo-8-(quinolin-3-yl)-2,3-dihydro-1H-imidazo[4,5-c]quinolin-1-yl]phenyl}propanenitrile (BEZ-235); apitolisib (GDC-0980, RG7422); 2,4-Difluoro-N-{2-(methyloxy)-5-[4-(4-pyridazinyl)-6-quinolinyl]-3-pyridinyl}benzenesulfonamide (GSK2126458); 8-(6-methoxypyridin-3-yl)-3-methyl-1-(4-(piperazin-1-yl)-3-(trifluoromethyl)phenyl)-1H-imidazo[4,5-c]quinolin-2(3H)-one Maleic acid (NVP-BGT226); 3-[4-(4-Morpholinylpyrido[3′,2′:4,5]furo[3,2-d]pyrimidin-2-yl]phenol (PI-103); 5-(9-isopropyl-8-methyl-2-morpholino-9H-purin-6-yl)pyrimidin-2-amine (VS-5584, SB2343); and N-[2-[(3,5-Dimethoxyphenyl)amino]quinoxalin-3-yl]-4-[(4-methyl-3-methoxyphenyl)carbonyl]aminophenylsulfonamide (XL765).

[1039] In embodiments, an anti-target CAR-expressing cell described herein is administered to a subject in combination with an anaplastic lymphoma kinase (ALK) inhibitor. Exemplary ALK kinases include but are not limited to crizotinib (Pfizer), ceritinib (Novartis), alectinib (Chugai), brigatinib (also called AP26113; Ariad), entrectinib (Ignyta), PF-06463922 (Pfizer), TSR-011 (Tesaro) (see, e.g., Clinical Trial Identifier No. NCT02048488), CEP-37440 (Teva), and X-396 (Xcovery). In some embodiments, the subject has a solid cancer, e.g., a solid cancer described herein, e.g., lung cancer.

[1040] The chemical name of crizotinib is 3-[(1R)-1-(2,6-dichloro-3-fluorophenyl)ethoxy]-5-(1-piperidin-4-yl)pyrazol-4-yl)pyridin-2-amine. The chemical name of ceritinib is 5-Chloro-N²-[2-isopropoxy-5-methyl-4-(4-piperidinyl)phenyl]-N⁴-[2-(isopropylsulfonyl)phenyl]-2,4-pyrimidinediamine. The chemical name of alectinib is 9-ethyl-6,6-dimethyl-8-(4-morpholinopiperidin-1-yl)-11-oxo-6,11-dihydro-5H-benzo[b]carbazole-3-carbonitrile. The chemical name of brigatinib is 5-Chloro-N²-{4-[4-(dimethylamino)-1-piperidinyl]-2-methoxyphenyl}-N⁴-[2-(dimethylphosphoryl)phenyl]-2,4-pyrimidinediamine. The chemical name of entrectinib is N-(5-(3,5-difluorobenzyl)-1H-indazol-3-yl)-4-(4-methylpiperazin-1-yl)-2-((tetrahydro-2H-pyran-4-yl)amino)benzamide. The chemical name of PF-06463922 is (10R)-7-Amino-12-fluoro-2,10,16-trimethyl-15-oxo-10,15,16,17-tetrahydro-2H-8,4-(metheno)pyrazolo[4,3-h][2,5,11]-benzoxadiazacyclotetradecine-3-carbonitrile. The chemical structure of CEP-37440 is (S)-2-((5-chloro-2-((6-(4-(2-hydroxyethyl)piperazin-1-yl)-1-methoxy-6,7,8,9-tetrahydro-5H-benzo[7]annulen-2-yl)amino)pyrimidin-4-yl)amino)-N-methylbenzamide. The chemical name of X-396 is (R)-6-amino-5-(1-(2,6-dichloro-3-fluorophenyl)ethoxy)-N-(4-(4-methylpiperazine-1-carbonyl)phenyl)pyridazine-3-carboxamide.

[1041] Drugs that inhibit either the calcium dependent phosphatase calcineurin (cyclosporine and FK506) or inhibit the p70S6 kinase that is important for growth factor induced signaling (rapamycin). (Liu et al., Cell 66:807-815, 1991; Henderson et al., Immun 73:316-321, 1991; Bierer et al., Curr. Opin. Immun 5. 763-773, 1993) can also be used. In a further aspect, the cell compositions of the present invention may be administered to a patient in conjunction with (e.g., before, simultaneously or following) bone marrow transplantation, T cell ablative therapy using chemotherapy agents such as, fludarabine, external-beam radiation therapy (XRT), cyclophosphamide, and/or antibodies such as OKT3 or CAMPATH. In one aspect, the cell compositions of the present invention are administered following B-cell ablative therapy such as agents that react with CD20, e.g., Rituxan. For example, in one embodiment, subjects may undergo standard treatment with high dose chemotherapy followed by peripheral blood stem cell transplantation. In certain embodiments, following the transplant, subjects receive an infusion of the expanded immune cells of the present invention. In an additional embodiment, expanded cells are administered before or following surgery.

[1042] In embodiments, an anti-target CAR-expressing cell described herein is administered to a subject in combination with an indoleamine 2,3-dioxygenase (IDO) inhibitor. IDO is an enzyme that catalyzes the degradation of the amino acid, L-tryptophan, to kynurenine. Many cancers overexpress IDO, e.g., prostatic, colorectal, pancreatic, cervical, gastric, ovarian, head, and lung cancer. pDCs, macrophages, and dendritic cells (DCs) can express IDO. Without being bound by theory, it is thought that a decrease in L-tryptophan (e.g., catalyzed by IDO) results in an immunosuppressive milieu by inducing T-cell anergy and apoptosis. Thus, without being bound by theory, it is thought that an IDO inhibitor can enhance the efficacy of an anti-target CAR-expressing cell described herein, e.g., by decreasing the suppression or death of an anti-target CAR-expressing immune cell. In embodiments, the subject has a solid tumor, e.g., a solid tumor described herein, e.g., prostatic, colorectal, pancreatic, cervical, gastric, ovarian, head, or lung cancer. Exemplary inhibitors of IDO include but are not limited to 1-methyl-tryptophan, indoximod (NewLink Genetics) (see, e.g., Clinical Trial Identifier Nos. NCT01191216; NCT01792050), and INCB024360 (Incyte Corp.) (see, e.g., Clinical Trial Identifier Nos. NCT01604889; NCT01685255).

[1043] In embodiments, an anti-target CAR-expressing cell described herein is administered to a subject in combination with a modulator of myeloid-derived suppressor cells (MDSCs). MDSCs accumulate in the periphery and at the tumor site of many solid tumors. These cells suppress T cell responses, thereby hindering the efficacy of anti-target CAR-expressing cell therapy. Without being bound by theory, it is thought that administration of a MDSC modulator enhances the efficacy of an anti-target CAR-expressing cell described herein. In an embodiment, the subject has a solid tumor, e.g., a solid tumor described herein, e.g., glioblastoma. Exemplary modulators of MDSCs include but are not limited to MCS 110 and BLZ945. MCS 110 is a monoclonal antibody (mAb) against macrophage colony-stimulating factor (M-CSF). See, e.g., Clinical Trial Identifier No. NCT00757757. BLZ945 is a small molecule inhibitor of colony stimulating factor 1 receptor (CSF1R). See, e.g., Pyonteck et al. Nat. Med. 19(2013):1264-72. The structure of BLZ945 is shown below.

[chemical structure]

[1044] In some embodiments, an anti-target CAR-expressing cell described herein is administered to a subject in combination with a interleukin-15 (IL-15) polypeptide, a interleukin-15 receptor alpha (IL-15Ra) polypeptide, or a combination of both a IL-15 polypeptide and a IL-15Ra polypeptide e.g., hetIL-15 (Admune Therapeutics, LLC). hetIL-15 is a heterodimeric non-covalent complex of IL-15 and IL-15Ra. hetIL-15 is described in, e.g., U.S. Pat. No. 8,124,084, U.S. 2012/0177598, U.S. 2009/0082299, U.S. 2012/0141413, and U.S. 2011/0081311, incorporated herein by reference. In embodiments, het-IL-15 is administered subcutaneously. In embodiments, the subject has a cancer, e.g., solid cancer, e.g., melanoma or colon cancer. In embodiments, the subject has a metastatic cancer.

[1045] In one embodiment, the subject can be administered an agent which reduces or ameliorates a side effect associated with the administration of an anti-target CAR-expressing cell. Side effects associated with the administration of an anti-target CAR-expressing cell include, but are not limited to CRS, and hemophagocytic lymphohistiocytosis (HLH), also termed Macrophage Activation Syndrome (MAS). Symptoms of CRS include high fevers, nausea, transient hypotension, hypoxia, and the like. CRS may include clinical constitutional signs and symptoms such as fever, fatigue, anorexia, myalgias, arthalgias, nausea, vomiting, and headache. CRS may include clinical skin signs and symptoms such as rash. CRS may include clinical gastrointestinal signs and symptoms such as nausea, vomiting and diarrhea. CRS may include clinical respiratory signs and symptoms such as tachypnea and hypoxemia. CRS may include clinical cardiovascular signs and symptoms such as tachycardia, widened pulse pressure, hypotension, increased cardiac output (early) and potentially diminished cardiac output (late). CRS may include clinical coagulation signs and symptoms such as elevated d-dimer, hypofibrinogenemia with or without bleeding. CRS may include clinical renal signs and symptoms such as azotemia. CRS may include clinical hepatic signs and symptoms such as transaminitis and hyperbilirubinemia. CRS may include clinical neurologic signs and symptoms such as headache, mental status changes, confusion, delirium, word finding difficulty or frank aphasia, hallucinations, tremor, dymetria, altered gait, and seizures.

[1046] Accordingly, the methods described herein can comprise administering an anti-target CAR-expressing cell described herein to a subject and further administering one or more agents to manage elevated levels of a soluble factor resulting from treatment with a anti-target CAR-expressing cell. In one embodiment, the soluble factor elevated in the subject is one or more of IFN-γ, TNFα, IL-2 and IL-6. In an embodiment, the factor elevated in the subject is one or more of IL-1, GM-CSF, IL-10, IL-8, IL-5 and fraktalkine. Therefore, an agent administered to treat this side effect can be an agent that neutralizes one or more of these soluble factors. In one embodiment, the agent that neutralizes one or more of these soluble forms is an antibody or antigen binding fragment thereof. Examples of such agents include, but are not limited to a steroid (e.g., corticosteroid), an inhibitor of TNFα, and an inhibitor of IL-6. An example of a TNFα inhibitor is an anti-TNFα antibody molecule such as, infliximab, adalimumab, certolizumab pegol, and golimumab. Another example of a TNFα inhibitor is a fusion protein such as entanercept. Small molecule inhibitors of TNFα include, but are not limited to, xanthine derivatives (e.g. pentoxifylline) and bupropion. An example of an IL-6 inhibitor is an anti-IL-6 antibody molecule or an anti-IL-6 receptor antibody molecule such as tocilizumab (toc), sarilumab, elsilimomab, CNTO 328, ALD518/BMS-945429, CNTO 136, CPSI-2364, CDP6038, VX30, ARGX-109, FB301, and FM101. In one embodiment, the anti-IL-6 receptor antibody molecule is tocilizumab. An example of an IL-1R based inhibitor is anakinra.

[1047] In one embodiment, the subject can be administered an agent which enhances the activity of a anti-target CAR-expressing cell. For example, in one embodiment, the agent can be an agent which inhibits an inhibitory molecule. Inhibitory molecules, e.g., Programmed Death 1 (PD-1), can, in some embodiments, decrease the ability of a anti-target CAR-expressing cell to mount an immune effector response. Examples of inhibitory molecules include PD-1, PD-L1, CTLA-4, TIM-3, CEACAM (e.g., CEACAM-1, CEACAM-3 and/or CEACAM-5), LAG-3, VISTA, BTLA, TIGIT, LAIR1, CD160, 2B4 and TGF beta. Inhibition of an inhibitory molecule, e.g., by inhibition at the DNA, RNA or protein level, can optimize a anti-target CAR-expressing cell performance. In embodiments, an inhibitory nucleic acid, e.g., an inhibitory nucleic acid, e.g., a dsRNA, e.g., an siRNA or shRNA, a clustered regularly interspaced short palindromic repeats (CRISPR), a transcription-activator like effector nuclease (TALEN), or a zinc finger endonuclease (ZFN), e.g., as described herein, can be used to inhibit expression of an inhibitory molecule in the anti-target CAR-expressing cell. In an embodiment the inhibitor is an shRNA. In an embodiment, the inhibitory molecule is inhibited within a anti-target CAR-expressing cell. In these embodiments, a dsRNA molecule that inhibits expression of the inhibitory molecule is linked to the nucleic acid that encodes a component, e.g., all of the components, of the anti-target CAR. In one embodiment, the inhibitor of an inhibitory signal can be, e.g., an antibody or antibody fragment that binds to an inhibitory molecule. For example, the agent can be an antibody or antibody fragment that binds to PD-1, PD-L1, PD-L2 or CTLA4 (e.g., ipilimumab (also referred to as MDX-010 and MDX-101, and marketed as Yervoy®; Bristol-Myers Squibb; Tremelimumab (IgG2 monoclonal antibody available from Pfizer, formerly known as ticilimumab, CP-675,206)). In an embodiment, the agent is an antibody or antibody fragment that binds to TIM3. In an embodiment, the agent is an antibody or antibody fragment that binds to CEACAM (CEACAM-1, CEACAM-3, and/or CEACAM-5). In an embodiment, the agent is an antibody or antibody fragment that binds to LAG3.

[1048] PD-1 is an inhibitory member of the CD28 family of receptors that also includes CD28, CTLA-4, ICOS, and BTLA. PD-1 is expressed on activated B cells, T cells and myeloid cells (Agata et al. 1996 Int. Immunol 8:765-75). Two ligands for PD-1, PD-L1 and PD-L2 have been shown to downregulate T cell activation upon binding to PD-1 (Freeman et a. 2000 J Exp Med 192:1027-34; Latchman et al. 2001 Nat Immunol 2:261-8; Carter et al. 2002 Eur J Immunol 32:634-43). PD-L1 is abundant in human cancers (Dong et al. 2003 J Mol Med 81:281-7; Blank et al. 2005 Cancer Immunol. Immunother 54:307-314; Konishi et al. 2004 Clin Cancer Res 10:5094) Immune suppression can be reversed by inhibiting the local interaction of PD-1 with PD-L1. Antibodies, antibody fragments, and other inhibitors of PD-1, PD-L1 and PD-L2 are available in the art and may be used combination with a cars of the present invention described herein. For example, nivolumab (also referred to as BMS-936558 or MDX1106; Bristol-Myers Squibb) is a fully human IgG4 monoclonal antibody which specifically blocks PD-1. Nivolumab (clone 5C4) and other human monoclonal antibodies that specifically bind to PD-1 are disclosed in U.S. Pat. No. 8,008,449 and WO2006/121168. Pidilizumab (CT-011; Cure Tech) is a humanized IgG1k monoclonal antibody that binds to PD-1. Pidilizumab and other humanized anti-PD-1 monoclonal antibodies are disclosed in WO2009/101611. Pembrolizumab (formerly known as lambrolizumab, and also referred to as MK03475; Merck) is a humanized IgG4 monoclonal antibody that binds to PD-1. Pembrolizumab and other humanized anti-PD-1 antibodies are disclosed in U.S. Pat. No. 8,354,509 and WO2009/114335. MEDI4736 (Medimmune) is a human monoclonal antibody that binds to PDL1, and inhibits interaction of the ligand with PD1. MDPL3280A (Genentech/Roche) is a human Fc optimized IgG1 monoclonal antibody that binds to PD-L1. MDPL3280A and other human monoclonal antibodies to PD-L1 are disclosed in U.S. Pat. No. 7,943,743 and U.S Publication No.: 20120039906. Other anti-PD-L1 binding agents include YW243.55.570 (heavy and light chain variable regions are shown in SEQ ID NOs 20 and 21 in WO2010/077634) and MDX-1 105 (also referred to as BMS-936559, and, e.g., anti-PD-L1 binding agents disclosed in WO2007/005874). AMP-224 (B7-DCIg; Amplimmune; e.g., disclosed in WO2010/027827 and WO2011/066342), is a PD-L2 Fc fusion soluble receptor that blocks the interaction between PD-1 and B7-H1. Other anti-PD-1 antibodies include AMP 514 (Amplimmune), among others, e.g., anti-PD-1 antibodies disclosed in U.S. Pat. No. 8,609,089, US 2010028330, and/or US 20120114649.

[1049] TIM-3 (T cell immunoglobulin-3) also negatively regulates T cell function, particularly in IFN-g-secreting CD4+T helper 1 and CD8+T cytotoxic 1 cells, and plays a critical role in T cell exhaustion. Inhibition of the interaction between TIM3 and its ligands, e.g., galectin-9 (Ga19), phosphotidylserine (PS), and HMGB1, can increase immune response. Antibodies, antibody fragments, and other inhibitors of TIM3 and its ligands are available in the art and may be used combination with a CD19 CAR described herein. For example, antibodies, antibody fragments, small molecules, or peptide inhibitors that target TIM3 binds to the IgV domain of TIM3 to inhibit interaction with its ligands. Antibodies and peptides that inhibit TIM3 are disclosed in WO2013/006490 and US20100247521. Other anti-TIM3 antibodies include humanized versions of RMT3-23 (disclosed in Ngiow et al., 2011, Cancer Res, 71:3540-3551), and clone 8B.2C12 (disclosed in Monney et al., 2002, Nature, 415:536-541). Bi-specific antibodies that inhibit TIM3 and PD-1 are disclosed in US20130156774.

[1050] In other embodiments, the agent that enhances the activity of a anti-target CAR-expressing cell is a CEACAM inhibitor (e.g., CEACAM-1, CEACAM-3, and/or CEACAM-5 inhibitor). In one embodiment, the inhibitor of CEACAM is an anti-CEACAM antibody molecule. Exemplary anti-CEACAM-1 antibodies are described in WO 2010/125571, WO 2013/082366 WO 2014/059251 and WO 2014/022332, e.g., a monoclonal antibody 34B1, 26H7, and 5F4; or a recombinant form thereof, as described in, e.g., US 2004/0047858, U.S. Pat. No. 7,132,255 and WO 99/052552. In other embodiments, the anti-CEACAM antibody binds to CEACAM-5 as described in, e.g., Zheng et al. PLoS One. Sep. 2, 2010; 5(9). pii: e12529 (DOI:10:1371/journal.pone.0021146), or crossreacts with CEACAM-1 and CEACAM-5 as described in, e.g., WO 2013/054331 and US 2014/0271618.

[1051] Without wishing to be bound by theory, carcinoembryonic antigen cell adhesion molecules (CEACAM), such as CEACAM-1 and CEACAM-5, are believed to mediate, at least in part, inhibition of an anti-tumor immune response (see e.g., Markel et al. J Immunol. Mar. 15, 2002; 168(6):2803-10; Markel et al. J Immunol. Nov. 1, 2006; 177(9):6062-71; Markel et al. Immunology. 2009 February; 126(2):186-200; Markel et al. Cancer Immunol Immunother. 2010 February; 59(2):215-30; Ortenberg et al. Mol Cancer Ther. 2012 June; 11(6):1300-10; Stern et al. J Immunol. Jun. 1, 2005; 174(11):6692-701; Zheng et al. PLoS One. Sep. 2, 2010; 5(9). pii: e12529). For example, CEACAM-1 has been described as a heterophilic ligand for TIM-3 and as playing a role in TIM-3-mediated T cell tolerance and exhaustion (see e.g., WO 2014/022332; Huang, et al. (2014) Nature doi:10.1038/nature13848). In embodiments, co-blockade of CEACAM-1 and TIM-3 has been shown to enhance an anti-tumor immune response in xenograft colorectal cancer models (see e.g., WO 2014/022332; Huang, et al. (2014), supra). In other embodiments, co-blockade of CEACAM-1 and PD-1 reduce T cell tolerance as described, e.g., in WO 2014/059251. Thus, CEACAM inhibitors can be used with the other immunomodulators described herein (e.g., anti-PD-1 and/or anti-TIM-3 inhibitors) to enhance an immune response against a cancer, e.g., a melanoma, a lung cancer (e.g., NSCLC), a bladder cancer, a colon cancer an ovarian cancer, and other cancers as described herein.

[1052] LAG-3 (lymphocyte activation gene-3 or CD223) is a cell surface molecule expressed on activated T cells and B cells that has been shown to play a role in CD8+ T cell exhaustion. Antibodies, antibody fragments, and other inhibitors of LAG-3 and its ligands are available in the art and may be used combination with a anti-target CAR described herein. For example, BMS-986016 (Bristol-Myers Squib) is a monoclonal antibody that targets LAG3. IMP701 (Immutep) is an antagonist LAG-3 antibody and IMP731 (Immutep and GlaxoSmithKline) is a depleting LAG-3 antibody. Other LAG-3 inhibitors include IMP321 (Immutep), which is a recombinant fusion protein of a soluble, portion of LAG3 and Ig that hinds to MHC class II molecules and activates antigen presenting cells (APC). Other antibodies are disclosed, e.g., in WO2010/019570.

[1053] In some embodiments, the agent which enhances the activity of a anti-target CAR-expressing cell can be, e.g., a fusion protein comprising a first domain and a second domain, wherein the first domain is an inhibitory molecule, or fragment thereof, and the second domain is a polypeptide that is associated with a positive signal, e.g., a polypeptide comprising an intracellular signaling domain as described herein. In some embodiments, the polypeptide that is associated with a positive signal can include a costimulatory domain of CD28, CD27, ICOS, e.g., an intracellular signaling domain of CD28, CD27 and/or ICOS, and/or a primary signaling domain, e.g., of CD3 zeta, e.g., described herein. In one embodiment, the fusion protein is expressed by the same cell that expressed the anti-target CAR. In another embodiment, the fusion protein is expressed by a cell, e.g., a T cell that does not express a CAR of the present invention.

[1054] In one embodiment, the agent which enhances activity of a anti-target CAR-expressing cell described herein is miR-17-92.

[1055] In one embodiment, the agent which enhances activity of a anti-target CAR-described herein is a cytokine. Cytokines have important functions related to T cell expansion, differentiation, survival, and homeostasis. Cytokines that can be administered to the subject receiving a anti-target CAR-expressing cell described herein include: IL-2, IL-4, IL-7, IL-9, IL-15, IL-18, and IL-21, or a combination thereof. In preferred embodiments, the cytokine administered is IL-7, IL-15, or IL-21, or a combination thereof. The cytokine can be administered once a day or more than once a day, e.g., twice a day, three times a day, or four times a day. The cytokine can be administered for more than one day, e.g. the cytokine is administered for 2 days, 3 days, 4 days, 5 days, 6 days, 1 week, 2 weeks, 3 weeks, or 4 weeks. For example, the cytokine is administered once a day for 7 days.

[1056] In embodiments, the cytokine is administered in combination with anti-target CAR-expressing T cells. The cytokine can be administered simultaneously or concurrently with the anti-target CAR-expressing T cells, e.g., administered on the same day. The cytokine may be prepared in the same pharmaceutical composition as the anti-target CAR-expressing T cells, or may be prepared in a separate pharmaceutical composition. Alternatively, the cytokine can be administered shortly after administration of the anti-target CAR-expressing T cells, e.g., 1 day, 2 days, 3 days, 4 days, 5 days, 6 days, or 7 days after administration of the anti-target CAR-expressing T cells. In embodiments where the cytokine is administered in a dosing regimen that occurs over more than one day, the first day of the cytokine dosing regimen can be on the same day as administration with the anti-target CAR-expressing T cells, or the first day of the cytokine dosing regimen can be 1 day, 2 days, 3 days, 4 days, 5 days, 6 days, or 7 days after administration of the anti-target CAR-expressing T cells. In one embodiment, on the first day, the anti-target CAR-expressing T cells are administered to the subject, and on the second day, a cytokine is administered once a day for the next 7 days. In a preferred embodiment, the cytokine to be administered in combination with anti-target CAR-expressing T cells is IL-7, IL-15, or IL-21.

[1057] In other embodiments, the cytokine is administered a period of time after administration of anti-target CAR-expressing cells, e.g., at least 2 weeks, 3 weeks, 4 weeks, 6 weeks, 8 weeks, 10 weeks, 12 weeks, 4 months, 5 months, 6 months, 7 months, 8 months, 9 months, 10 months, 11 months, or 1 year or more after administration of anti-target CAR-expressing cells. In one embodiment, the cytokine is administered after assessment of the subject's response to the anti-target CAR-expressing cells. For example, the subject is administered anti-target CAR-expressing cells according to the dosage and regimens described herein. The response of the subject to anti-target CAR-expressing cell therapy is assessed at 2 weeks, 3 weeks, 4 weeks, 6 weeks, 8 weeks, 10 weeks, 12 weeks, 4 months, 5 months, 6 months, 7 months, 8 months, 9 months, 10 months, 11 months, or 1 year or more after administration of anti-target CAR-expressing cells, using any of the methods described herein, including inhibition of tumor growth, reduction of circulating tumor cells, or tumor regression. Subjects that do not exhibit a sufficient response to anti-target CAR-expressing cell therapy can be administered a cytokine. Administration of the cytokine to the subject that has sub-optimal response to the anti-target CAR-expressing cell therapy improves anti-target CAR-expressing cell efficacy or anti-cancer activity. In a preferred embodiment, the cytokine administered after administration of anti-target CAR-expressing cells is IL-7.

Combination with a Low Dose of an mTOR Inhibitor

[1058] In one embodiment, the cells expressing a anti-target CAR molecule, e.g., a anti-target CAR molecule described herein, are administered in combination with a low, immune enhancing dose of an mTOR inhibitor.

[1059] In an embodiment, a dose of an mTOR inhibitor is associated with, or provides, mTOR inhibition of at least 5 but no more than 90%, at least 10 but no more than 90%, at least 15, but no more than 90%, at least 20 but no more than 90%, at least 30 but no more than 90%, at least 40 but no more than 90%, at least 50 but no more than 90%, at least 60 but no more than 90%, or at least 70 but no more than 90%.

[1060] In an embodiment, a dose of an mTOR inhibitor is associated with, or provides, mTOR inhibition of at least 5 but no more than 80%, at least 10 but no more than 80%, at least 15, but no more than 80%, at least 20 but no more than 80%, at least 30 but no more than 80%, at least 40 but no more than 80%, at least 50 but no more than 80%, or at least 60 but no more than 80%.

[1061] In an embodiment, a dose of an mTOR inhibitor is associated with, or provides, mTOR inhibition of at least 5 but no more than 70%, at least 10 but no more than 70%, at least 15, but no more than 70%, at least 20 but no more than 70%, at least 30 but no more than 70%, at least 40 but no more than 70%, or at least 50 but no more than 70%.

[1062] In an embodiment, a dose of an mTOR inhibitor is associated with, or provides, mTOR inhibition of at least 5 but no more than 60%, at least 10 but no more than 60%, at least 15, but no more than 60%, at least 20 but no more than 60%, at least 30 but no more than 60%, or at least 40 but no more than 60%.

[1063] In an embodiment, a dose of an mTOR inhibitor is associated with, or provides, mTOR inhibition of at least 5 but no more than 50%, at least 10 but no more than 50%, at least 15, but no more than 50%, at least 20 but no more than 50%, at least 30 but no more than 50%, or at least 40 but no more than 50%.

[1064] In an embodiment, a dose of an mTOR inhibitor is associated with, or provides, mTOR inhibition of at least 5 but no more than 40%, at least 10 but no more than 40%, at least 15, but no more than 40%, at least 20 but no more than 40%, at least 30 but no more than 40%, or at least 35 but no more than 40%.

[1065] In an embodiment, a dose of an mTOR inhibitor is associated with, or provides, mTOR inhibition of at least 5 but no more than 30%, at least 10 but no more than 30%, at least 15, but no more than 30%, at least 20 but no more than 30%, or at least 25 but no more than 30%.

[1066] In an embodiment, a dose of an mTOR inhibitor is associated with, or provides, mTOR inhibition of at least 1, 2, 3, 4 or 5 but no more than 20%, at least 1, 2, 3, 4 or 5 but no more than 30%, at least 1, 2, 3, 4 or 5, but no more than 35, at least 1, 2, 3, 4 or 5 but no more than 40%, or at least 1, 2, 3, 4 or 5 but no more than 45%.

[1067] In an embodiment, a dose of an mTOR inhibitor is associated with, or provides, mTOR inhibition of at least 1, 2, 3, 4 or 5 but no more than 90%.

[1068] As is discussed herein, the extent of mTOR inhibition can be expressed as the extent of P70 S6 kinase inhibition, e.g., the extent of mTOR inhibition can be determined by the level of decrease in P70 S6 kinase activity, e.g., by the decrease in phosphorylation of a P70 S6 kinase substrate. The level of mTOR inhibition can be evaluated by a method described herein, e.g. by the Boulay assay, or measurement of phosphorylated S6 levels by western blot.

### Exemplary MTOR Inhibitors

[1069] As used herein, the term “mTOR inhibitor” refers to a compound or ligand, or a pharmaceutically acceptable salt thereof, which inhibits the mTOR kinase in a cell. In an embodiment an mTOR inhibitor is an allosteric inhibitor. In an embodiment an mTOR inhibitor is a catalytic inhibitor.

[1070] Allosteric mTOR inhibitors include the neutral tricyclic compound rapamycin (sirolimus), rapamycin-related compounds, that is compounds having structural and functional similarity to rapamycin including, e.g., rapamycin derivatives, rapamycin analogs (also referred to as rapalogs) and other macrolide compounds that inhibit mTOR activity.

[1071] Rapamycin is a known macrolide antibiotic produced by Streptomyces hygroscopicus having the structure shown in Formula A.

[chemical structure]

[1072] See, e.g., McAlpine, J. B., et al., J. Antibiotics (1991) 44: 688; Schreiber, S. L., et al., J. Am. Chem. Soc. (1991) 113: 7433; U.S. Pat. No. 3,929,992. There are various numbering schemes proposed for rapamycin. To avoid confusion, when specific rapamycin analogs are named herein, the names are given with reference to rapamycin using the numbering scheme of formula A.

[1073] Rapamycin analogs useful in the invention are, for example, O-substituted analogs in which the hydroxyl group on the cyclohexyl ring of rapamycin is replaced by OR₁ in which R₁ is hydroxyalkyl, hydroxyalkoxyalkyl, acylaminoalkyl, or aminoalkyl; e.g. RAD001, also known as, everolimus as described in U.S. Pat. No. 5,665,772 and WO94/09010 the contents of which are incorporated by reference. Other suitable rapamycin analogs include those substituted at the 26- or 28-position. The rapamycin analog may be an epimer of an analog mentioned above, particularly an epimer of an analog substituted in position 40, 28 or 26, and may optionally be further hydrogenated, e.g. as described in U.S. Pat. No. 6,015,815, WO95/14023 and WO99/15530 the contents of which are incorporated by reference, e.g. ABT578 also known as zotarolimus or a rapamycin analog described in U.S. Pat. No. 7,091,213, WO98/02441 and WO01/14387 the contents of which are incorporated by reference, e.g. AP23573 also known as ridaforolimus.

[1074] Examples of rapamycin analogs suitable for use in the present invention from U.S. Pat. No. 5,665,772 include, but are not limited to, 40-O-benzyl-rapamycin, 40-O-(4′-hydroxymethyl)benzyl-rapamycin, 40-O-[4′-(1,2-dihydroxyethyl)]benzyl-rapamycin, 40-O-allyl-rapamycin, 40-O-[3′-(2,2-dimethyl-1,3-dioxolan-4(S)-yl)-prop-2′-en-1′-yl]-rapamycin, (2′E,4'S)-40-O-(4′,5′-dihydroxypent-2′-en-1′-yl)-rapamycin, 40-O-(2-hydroxy)ethoxycarbonylmethyl-rapamycin, 40-O-(2-hydroxy)ethyl-rapamycin, 40-O-(3-hydroxy)propyl-rapamycin, 40-O-(6-hydroxy)hexyl-rapamycin, 40-O-[2-(2-hydroxy)ethoxy]ethyl-rapamycin, 40-O-[(3S)-2,2-dimethyldioxolan-3-yl]methyl-rapamycin, 40-O-[(2S)-2,3-dihydroxyprop-1-yl]-rapamycin, 40-O-(2-acetoxy)ethyl-rapamycin, 40-O-(2-nicotinoyloxy)ethyl-rapamycin, 40-O-[2-(N-morpholino)acetoxy]ethyl-rapamycin, 40-O-(2-N-imidazolylacetoxy)ethyl-rapamycin, 40-O-[2-(N-methyl-N′-piperazinyl)acetoxy]ethyl-rapamycin, 39-O-desmethyl-39,40-O,O-ethylene-rapamycin, (26R)-26-dihydro-40-O-(2-hydroxy)ethyl-rapamycin, 40-O-(2-aminoethyl)-rapamycin, 40-O-(2-acetaminoethyl)-rapamycin, 40-O-(2-nicotinamidoethyl)-rapamycin, 40-O-(2-(N-methyl-imidazo-2′-ylcarbethoxamido)ethyl)-rapamycin, 40-O-(2-ethoxycarbonylaminoethyl)-rapamycin, 40-O-(2-tolylsulfonamidoethyl)-rapamycin and 40 O-[2-(4′,5′-dicarboethoxy-1′,2′,3′-triazol-1′-yl)-ethyl]-rapamycin.

[1075] Other rapamycin analogs useful in the present invention are analogs where the hydroxyl group on the cyclohexyl ring of rapamycin and/or the hydroxy group at the 28 position is replaced with an hydroxyester group are known, for example, rapamycin analogs found in U.S. RE44,768, e.g. temsirolimus.

[1076] Other rapamycin analogs useful in the preset invention include those wherein the methoxy group at the 16 position is replaced with another substituent, preferably (optionally hydroxy-substituted) alkynyloxy, benzyl, orthomethoxybenzyl or chlorobenzyl and/or wherein the mexthoxy group at the 39 position is deleted together with the 39 carbon so that the cyclohexyl ring of rapamycin becomes a cyclopentyl ring lacking the 39 position methyoxy group; e.g. as described in WO95/16691 and WO96/41807 the contents of which are incorporated by reference. The analogs can be further modified such that the hydroxy at the 40-position of rapamycin is alkylated and/or the 32-carbonyl is reduced.

[1077] Rapamycin analogs from WO95/16691 include, but are not limited to, 16-demthoxy-16-(pent-2-ynyl)oxy-rapamycin, 16-demthoxy-16-(but-2-ynyl)oxy-rapamycin, 16-demthoxy-16-(propargyl)oxy-rapamycin, 16-demethoxy-16-(4-hydroxy-but-2-ynyl)oxy-rapamycin, 16-demthoxy-16-benzyloxy-40-O-(2-hydroxyethyl)-rapamycin, 16-demthoxy-16-benzyloxy-rapamycin, 16-demethoxy-16-ortho-methoxybenzyl-rapamycin, 16-demethoxy-40-O-(2-methoxyethyl)-16-pent-2-ynyl)oxy-rapamycin, 39-demethoxy-40-desoxy-39-formyl-42-nor-rapamycin, 39-demethoxy-40-desoxy-39-hydroxymethyl-42-nor-rapamycin, 39-demethoxy-40-desoxy-39-carboxy-42-nor-rapamycin, 39-demethoxy-40-desoxy-39-(4-methyl-piperazin-1-yl)carbonyl-42-nor-rapamycin, 39-demethoxy-40-desoxy-39-(morpholin-4-yl)carbonyl-42-nor-rapamycin, 39-demethoxy-40-desoxy-39-[N-methyl, N-(2-pyridin-2-yl-ethyl)]carbamoyl-42-nor-rapamycin and 39-demethoxy-40-desoxy-39-(p-toluenesulfonylhydrazonomethyl)-42-nor-rapamycin.

[1078] Rapamycin analogs from WO96/41807 include, but are not limited to, 32-deoxo-rapamycin, 16-O-pent-2-ynyl-32-deoxo-rapamycin, 16-O-pent-2-ynyl-32-deoxo-40-O-(2-hydroxy-ethyl)-rapamycin, 16-O-pent-2-ynyl-32-(S)-dihydro-40-O-(2-hydroxyethyl)-rapamycin, 32(S)-dihydro-40-O-(2-methoxy)ethyl-rapamycin and 32(S)-dihydro-40-O-(2-hydroxyethyl)-rapamycin.

[1079] Another suitable rapamycin analog is umirolimus as described in US2005/0101624 the contents of which are incorporated by reference.

[1080] RAD001, otherwise known as everolimus (Afinitor®), has the chemical name (1R,9S,12S,15R,16E,18R,19R,21R,23S,24E,26E,28E,30S,32S,35R)-1,18-dihydroxy-12-{(1R)-2-[(1 S,3R,4R)-4-(2-hydroxyethoxy)-3-methoxycyclohexyl]-1-methylethyl}-19,30-dimethoxy-15,17,21,23,29,35-hexamethyl-11,36-dioxa-4-aza-tricyclo[30.3.1.04,9]hexatriaconta-16,24,26,28-tetraene-2,3,10,14,20-pentaone

[1081] Further examples of allosteric mTOR inhibitors include sirolimus (rapamycin, AY-22989), 40-[3-hydroxy-2-(hydroxymethyl)-2-methylpropanoate]-rapamycin (also called temsirolimus or CCI-779) and ridaforolimus (AP-23573/MK-8669). Other examples of allosteric mTor inhibtors include zotarolimus (ABT578) and umirolimus.

[1082] Alternatively or additionally, catalytic, ATP-competitive mTOR inhibitors have been found to target the mTOR kinase domain directly and target both mTORC1 and mTORC2. These are also more effective inhibitors of mTORC1 than such allosteric mTOR inhibitors as rapamycin, because they modulate rapamycin-resistant mTORC1 outputs such as 4EBP1-T37/46 phosphorylation and cap-dependent translation.

[1083] Catalytic inhibitors include: BEZ235 or 2-methyl-2-[4-(3-methyl-2-oxo-8-quinolin-3-yl-2,3-dihydro-imidazo[4,5-c]quinolin-1-yl)-phenyl]-propionitrile, or the monotosylate salt form. the synthesis of BEZ235 is described in WO2006/122806; CCG168 (otherwise known as AZD-8055, Chresta, C. M., et al., Cancer Res, 2010, 70(1), 288-298) which has the chemical name {5-[2,4-bis-((S)-3-methyl-morpholin-4-yl)-pyrido[2,3d]pyrimidin-7-yl]-2-methoxy-phenyl}-methanol; 3-[2,4-bis[(3S)-3-methylmorpholin-4-yl]pyrido[2,3-d]pyrimidin-7-yl]-N-methylbenzamide (WO09104019); 3-(2-aminobenzo[d]oxazol-5-yl)-1-isopropyl-1H-pyrazolo[3,4-d]pyrimidin-4-amine (WO10051043 and WO2013023184); A N-(3-(N-(3-((3,5-dimethoxyphenyl)amino) quinoxaline-2-yl) sulfamoyl)phenyl)-3-methoxy-4-methylbenzamide (WO07044729 and WO12006552); PKI-587 (Venkatesan, A. M., J. Med. Chem., 2010, 53, 2636-2645) which has the chemical name 1-[4-[4-(dimethylamino)piperidine-1-carbonyl]phenyl]-3-[4-(4,6-dimorpholino-1,3,5-triazin-2-yl)phenyl]urea; GSK-2126458 (ACS Med. Chem. Lett., 2010, 1, 39-43) which has the chemical name 2,4-difluoro-N-{2-methoxy-5-[4-(4-pyridazinyl)-6-quinolinyl]-3-pyridinyl}benzenesulfonamide; 5-(9-isopropyl-8-methyl-2-morpholino-9H-purin-6-yl)pyrimidin-2-amine (WO10114484); (E)-N-(8-(6-amino-5-(trifluoromethyl)pyridin-3-yl)-1-(6-(2-cyanopropan-2-yl)pyridin-3-yl)-3-methyl-1H-imidazo[4,5-c]quinolin-2(3H)-ylidene)cyanamide (WO12007926).

[1084] Further examples of catalytic mTOR inhibitors include 8-(6-methoxy-pyridin-3-yl)-3-methyl-1-(4-piperazin-1-yl-3-trifluoromethyl-phenyl)-1,3-dihydro-imidazo[4,5-c]quinolin-2-one (WO2006/122806) and Ku-0063794 (Garcia-Martinez J M, et al., Biochem J., 2009, 421(1), 29-42. Ku-0063794 is a specific inhibitor of the mammalian target of rapamycin (mTOR).) WYE-354 is another example of a catalytic mTor inhibitor (Yu K, et al. (2009). Biochemical, Cellular, and In vivo Activity of Novel ATP-Competitive and Selective Inhibitors of the Mammalian Target of Rapamycin. Cancer Res. 69(15): 6232-6240).

[1085] mTOR inhibitors useful according to the present invention also include prodrugs, derivatives, pharmaceutically acceptable salts, or analogs thereof of any of the foregoing.

[1086] mTOR inhibitors, such as RAD001, may be formulated for delivery based on well-established methods in the art based on the particular dosages described herein. In particular, U.S. Pat. No. 6,004,973 (incorporated herein by reference) provides examples of formulations useable with the mTOR inhibitors described herein.

### Evaluation of MTOR Inhibition

[1087] mTOR phosphorylates the kinase P70 S6, thereby activating P70 S6 kinase and allowing it to phosphorylate its substrate. The extent of mTOR inhibition can be expressed as the extent of P70 S6 kinase inhibition, e.g., the extent of mTOR inhibition can be determined by the level of decrease in P70 S6 kinase activity, e.g., by the decrease in phosphorylation of a P70 S6 kinase substrate. One can determine the level of mTOR inhibition, by measuring P70 S6 kinase activity (the ability of P70 S6 kinase to phosphorylate a substrate), in the absence of inhibitor, e.g., prior to administration of inhibitor, and in the presences of inhibitor, or after the administration of inhibitor. The level of inhibition of P70 S6 kinase gives the level of mTOR inhibition. Thus, if P70 S6 kinase is inhibited by 40%, mTOR activity, as measured by P70 S6 kinase activity, is inhibited by 40%. The extent or level of inhibition referred to herein is the average level of inhibition over the dosage interval. By way of example, if the inhibitor is given once per week, the level of inhibition is given by the average level of inhibition over that interval, namely a week.

[1088] Boulay et al., Cancer Res, 2004, 64:252-61, hereby incorporated by reference, teaches an assay that can be used to assess the level of mTOR inhibition (referred to herein as the Boulay assay). In an embodiment, the assay relies on the measurement of P70 S6 kinase activity from biological samples before and after administration of an mTOR inhibitor, e.g., RAD001. Samples can be taken at preselected times after treatment with an mTOR inhibitor, e.g., 24, 48, and 72 hours after treatment. Biological samples, e.g., from skin or peripheral blood mononuclear cells (PBMCs) can be used. Total protein extracts are prepared from the samples. P70 S6 kinase is isolated from the protein extracts by immunoprecipitation using an antibody that specifically recognizes the P70 S6 kinase. Activity of the isolated P70 S6 kinase can be measured in an in vitro kinase assay. The isolated kinase can be incubated with 40S ribosomal subunit substrates (which is an endogenous substrate of P70 S6 kinase) and gamma-³²P under conditions that allow phosphorylation of the substrate. Then the reaction mixture can be resolved on an SDS-PAGE gel, and ³²P signal analyzed using a PhosphorImager. A ³²P signal corresponding to the size of the 40S ribosomal subunit indicates phosphorylated substrate and the activity of P70 S6 kinase. Increases and decreases in kinase activity can be calculated by quantifying the area and intensity of the ³²P signal of the phosphorylated substrate (e.g., using ImageQuant, Molecular Dynamics), assigning arbitrary unit values to the quantified signal, and comparing the values from after administration with values from before administration or with a reference value. For example, percent inhibition of kinase activity can be calculated with the following formula: 1-(value obtained after administration/value obtained before administration)×100. As described above, the extent or level of inhibition referred to herein is the average level of inhibition over the dosage interval.

[1089] Methods for the evaluation of kinase activity, e.g., P70 S6 kinase activity, are also provided in U.S. Pat. No. 7,727,950, hereby incorporated by reference.

[1090] The level of mTOR inhibition can also be evaluated by a change in the ration of PD1 negative to PD1 positive T cells. T cells from peripheral blood can be identified as PD1 negative or positive by art-known methods.

Low-Dose mTOR Inhibitors

[1091] Methods described herein use low, immune enhancing, dose mTOR inhibitors, doses of mTOR inhibitors, e.g., allosteric mTOR inhibitors, including rapalogs such as RAD001. In contrast, levels of inhibitor that fully or near fully inhibit the mTOR pathway are immunosuppressive and are used, e.g., to prevent organ transplant rejection. In addition, high doses of rapalogs that fully inhibit mTOR also inhibit tumor cell growth and are used to treat a variety of cancers (See, e.g., Antineoplastic effects of mammalian target of rapamycine inhibitors. Salvadori M. World J Transplant. Oct. 24, 2012; 2(5):74-83; Current and Future Treatment Strategies for Patients with Advanced Hepatocellular Carcinoma: Role of mTOR Inhibition. Finn R S. Liver Cancer. 2012 November; 1(3-4):247-256; Emerging Signaling Pathways in Hepatocellular Carcinoma. Moeini A, Corneliá H, Villanueva A. Liver Cancer. 2012 September; 1(2):83-93; Targeted cancer therapy—Are the days of systemic chemotherapy numbered?Joo W D, Visintin I, Mor G. Maturitas. Sep. 20, 2013; Role of natural and adaptive immunity in renal cell carcinoma response to VEGFR-TKIs and mTOR inhibitor. Santoni M, Berardi R, Amantini C, Burattini L, Santini D, Santoni G, Cascinu S. Int J Cancer. Oct. 2, 2013).

[1092] The present invention is based, at least in part, on the surprising finding that doses of mTOR inhibitors well below those used in current clinical settings had a superior effect in increasing an immune response in a subject and increasing the ratio of PD-1 negative T cells/PD-1 positive T cells. It was surprising that low doses of mTOR inhibitors, producing only partial inhibition of mTOR activity, were able to effectively improve immune responses in human subjects and increase the ratio of PD-1 negative T cells/PD-1 positive T cells.

[1093] Alternatively, or in addition, without wishing to be bound by any theory, it is believed that low, a low, immune enhancing, dose of an mTOR inhibitor can increase naive T cell numbers, e.g., at least transiently, e.g., as compared to a non-treated subject. Alternatively or additionally, again while not wishing to be bound by theory, it is believed that treatment with an mTOR inhibitor after a sufficient amount of time or sufficient dosing results in one or more of the following:

[1094] an increase in the expression of one or more of the following markers: CD62L^{high}, CD127^{high}, CD27⁺, and BCL2, e.g., on memory T cells, e.g., memory T cell precursors;

[1095] a decrease in the expression of KLRG1, e.g., on memory T cells, e.g., memory T cell precursors; and

[1096] an increase in the number of memory T cell precursors, e.g., cells with any one or combination of the following characteristics: increased CD62L^{high}, increased CD127^{high}, increased CD27⁺, decreased KLRG1, and increased BCL2;

[1097] and wherein any of the changes described above occurs, e.g., at least transiently, e.g., as compared to a non-treated subject (Araki, K et al. (2009) Nature 460:108-112). Memory T cell precursors are memory T cells that are early in the differentiation program. For example, memory T cells have one or more of the following characteristics: increased CD62L^{high}, increased CD127^{high}, increased CD27+, decreased KLRG1, and/or increased BCL2.

[1098] In an embodiment, the invention relates to a composition, or dosage form, of an mTOR inhibitor, e.g., an allosteric mTOR inhibitor, e.g., a rapalog, rapamycin, or RAD001, or a catalytic mTOR inhibitor, which, when administered on a selected dosing regimen, e.g., once daily or once weekly, is associated with: a level of mTOR inhibition that is not associated with complete, or significant immune suppression, but is associated with enhancement of the immune response.

[1099] An mTOR inhibitor, e.g., an allosteric mTOR inhibitor, e.g., a rapalog, rapamycin, or RAD001, or a catalytic mTOR inhibitor, can be provided in a sustained release formulation. Any of the compositions or unit dosage forms described herein can be provided in a sustained release formulation. In some embodiments, a sustained release formulation will have lower bioavailability than an immediate release formulation. E.g., in embodiments, to attain a similar therapeutic effect of an immediate release formulation a sustained release formulation will have from about 2 to about 5, about 2.5 to about 3.5, or about 3 times the amount of inhibitor provided in the immediate release formulation.

[1100] In an embodiment, immediate release forms, e.g., of RAD001, typically used for one administration per week, having 0.1 to 20, 0.5 to 10, 2.5 to 7.5, 3 to 6, or about 5, mgs per unit dosage form, are provided. For once per week administrations, these immediate release formulations correspond to sustained release forms, having, respectively, 0.3 to 60, 1.5 to 30, 7.5 to 22.5, 9 to 18, or about 15 mgs of an mTOR inhibitor, e.g., an allosteric mTOR inhibitor, e.g., rapamycin or RAD001. In embodiments both forms are administered on a once/week basis.

[1101] In an embodiment, immediate release forms, e.g., of RAD001, typically used for one administration per day, having 0.005 to 1.5, 0.01 to 1.5, 0.1 to 1.5, 0.2 to 1.5, 0.3 to 1.5, 0.4 to 1.5, 0.5 to 1.5, 0.6 to 1.5, 0.7 to 1.5, 0.8 to 1.5, 1.0 to 1.5, 0.3 to 0.6, or about 0.5 mgs per unit dosage form, are provided. For once per day administrations, these immediate release forms correspond to sustained release forms, having, respectively, 0.015 to 4.5, 0.03 to 4.5, 0.3 to 4.5, 0.6 to 4.5, 0.9 to 4.5, 1.2 to 4.5, 1.5 to 4.5, 1.8 to 4.5, 2.1 to 4.5, 2.4 to 4.5, 3.0 to 4.5, 0.9 to 1.8, or about 1.5 mgs of an mTOR inhibitor, e.g., an allosteric mTOR inhibitor, e.g., rapamycin or RAD001. For once per week administrations, these immediate release forms correspond to sustained release forms, having, respectively, 0.1 to 30, 0.2 to 30, 2 to 30, 4 to 30, 6 to 30, 8 to 30, 10 to 30, 1.2 to 30, 14 to 30, 16 to 30, 20 to 30, 6 to 12, or about 10 mgs of an mTOR inhibitor, e.g., an allosteric mTOR inhibitor, e.g., rapamycin or RAD001.

[1102] In an embodiment, immediate release forms, e.g., of RAD001, typically used for one administration per day, having 0.01 to 1.0 mgs per unit dosage form, are provided. For once per day administrations, these immediate release forms correspond to sustained release forms, having, respectively, 0.03 to 3 mgs of an mTOR inhibitor, e.g., an allosteric mTOR inhibitor, e.g., rapamycin or RAD001. For once per week administrations, these immediate release forms correspond to sustained release forms, having, respectively, 0.2 to 20 mgs of an mTOR inhibitor, e.g., an allosteric mTOR inhibitor, e.g., rapamycin or RAD001.

[1103] In an embodiment, immediate release forms, e.g., of RAD001, typically used for one administration per week, having 0.5 to 5.0 mgs per unit dosage form, are provided. For once per week administrations, these immediate release forms correspond to sustained release forms, having, respectively, 1.5 to 15 mgs of an mTOR inhibitor, e.g., an allosteric mTOR inhibitor, e.g., rapamycin or RAD001.

[1104] As described above, one target of the mTOR pathway is the P70 S6 kinase. Thus, doses of mTOR inhibitors which are useful in the methods and compositions described herein are those which are sufficient to achieve no greater than 80% inhibition of P70 S6 kinase activity relative to the activity of the P70 S6 kinase in the absence of an mTOR inhibitor, e.g., as measured by an assay described herein, e.g., the Boulay assay. In a further aspect, the invention provides an amount of an mTOR inhibitor sufficient to achieve no greater than 38% inhibition of P70 S6 kinase activity relative to P70 S6 kinase activity in the absence of an mTOR inhibitor.

[1105] In one aspect the dose of mTOR inhibitor useful in the methods and compositions of the invention is sufficient to achieve, e.g., when administered to a human subject, 90+/−5% (i.e., 85-95%), 89+/−5%, 88+/−5%, 87+/−5%, 86+/−5%, 85+/−5%, 84+/−5%, 83+/−5%, 82+/−5%, 81+/−5%, 80+/−5%, 79+/−5%, 78+/−5%, 77+/−5%, 76+/−5%, 75+/−5%, 74+/−5%, 73+/−5%, 72+/−5%, 71+/−5%, 70+/−5%, 69+/−5%, 68+/−5%, 67+/−5%, 66+/−5%, 65+/−5%, 64+/−5%, 63+/−5%, 62+/−5%, 61+/−5%, 60+/−5%, 59+/−5%, 58+/−5%, 57+/−5%, 56+/−5%, 55+/−5%, 54+/−5%, 54+/−5%, 53+/−5%, 52+/−5%, 51+/−5%, 50+/−5%, 49+/−5%, 48+/−5%, 47+/−5%, 46+/−5%, 45+/−5%, 44+/−5%, 43+/−5%, 42+/−5%, 41+/−5%, 40+/−5%, 39+/−5%, 38+/−5%, 37+/−5%, 36+/−5%, 35+/−5%, 34+/−5%, 33+/−5%, 32+/−5%, 31+/−5%, 30+/−5%, 29+/−5%, 28+/−5%, 27+/−5%, 26+/−5%, 25+/−5%, 24+/−5%, 23+/−5%, 22+/−5%, 21+/−5%, 20+/−5%, 19+/−5%, 18+/−5%, 17+/−5%, 16+/−5%, 15+/−5%, 14+/−5%, 13+/−5%, 12+/−5%, 11+/−5%, or 10+/−5%, inhibition of P70 S6 kinase activity, e.g., as measured by an assay described herein, e.g., the Boulay assay.

[1106] P70 S6 kinase activity in a subject may be measured using methods known in the art, such as, for example, according to the methods described in U.S. Pat. No. 7,727,950, by immunoblot analysis of phosphoP70 S6K levels and/or phosphoP70 S6 levels or by in vitro kinase activity assays.

[1107] As used herein, the term “about” in reference to a dose of mTOR inhibitor refers to up to a +/−10% variability in the amount of mTOR inhibitor, but can include no variability around the stated dose.

[1108] In some embodiments, the invention provides methods comprising administering to a subject an mTOR inhibitor, e.g., an allosteric inhibitor, e.g., RAD001, at a dosage within a target trough level. In some embodiments, the trough level is significantly lower than trough levels associated with dosing regimens used in organ transplant and cancer patients. In an embodiment mTOR inhibitor, e.g., RAD001, or rapamycin, is administered to result in a trough level that is less than ½, ¼, 1/10, or 1/20 of the trough level that results in immunosuppression or an anticancer effect. In an embodiment mTOR inhibitor, e.g., RAD001, or rapamycin, is administered to result in a trough level that is less than ½, ¼, 1/10, or 1/20 of the trough level provided on the FDA approved packaging insert for use in immunosuppression or an anticancer indications.

[1109] In an embodiment a method disclosed herein comprises administering to a subject an mTOR inhibitor, e.g., an allosteric inhibitor, e.g., RAD001, at a dosage that provides a target trough level of 0.1 to 10 ng/ml, 0.1 to 5 ng/ml, 0.1 to 3 ng/ml, 0.1 to 2 ng/ml, or 0.1 to 1 ng/ml.

[1110] In an embodiment a method disclosed herein comprises administering to a subject an mTOR inhibitor, e.g., an allosteric inhibitor, e.g., RAD001, at a dosage that provides a target trough level of 0.2 to 10 ng/ml, 0.2 to 5 ng/ml, 0.2 to 3 ng/ml, 0.2 to 2 ng/ml, or 0.2 to 1 ng/ml.

[1111] In an embodiment a method disclosed herein comprises administering to a subject an mTOR inhibitor, e.g. an, allosteric inhibitor, e.g., RAD001, at a dosage that provides a target trough level of 0.3 to 10 ng/ml, 0.3 to 5 ng/ml, 0.3 to 3 ng/ml, 0.3 to 2 ng/ml, or 0.3 to 1 ng/ml.

[1112] In an embodiment a method disclosed herein comprises administering to a subject an mTOR inhibitor, e.g., an allosteric inhibitor, e.g., RAD001, at a dosage that provides a target trough level of 0.4 to 10 ng/ml, 0.4 to 5 ng/ml, 0.4 to 3 ng/ml, 0.4 to 2 ng/ml, or 0.4 to 1 ng/ml.

[1113] In an embodiment a method disclosed herein comprises administering to a subject an mTOR inhibitor, e.g., an allosteric inhibitor, e.g., RAD001, at a dosage that provides a target trough level of 0.5 to 10 ng/ml, 0.5 to 5 ng/ml, 0.5 to 3 ng/ml, 0.5 to 2 ng/ml, or 0.5 to 1 ng/ml.

[1114] In an embodiment a method disclosed herein comprises administering to a subject an mTOR inhibitor, e.g., an allosteric inhibitor, e.g., RAD001, at a dosage that provides a target trough level of 1 to 10 ng/ml, 1 to 5 ng/ml, 1 to 3 ng/ml, or 1 to 2 ng/ml.

[1115] As used herein, the term “trough level” refers to the concentration of a drug in plasma just before the next dose, or the minimum drug concentration between two doses.

[1116] In some embodiments, a target trough level of RAD001 is in a range of between about 0.1 and 4.9 ng/ml. In an embodiment, the target trough level is below 3 ng/ml, e.g., is between 0.3 or less and 3 ng/ml. In an embodiment, the target trough level is below 3 ng/ml, e.g., is between 0.3 or less and 1 ng/ml.

[1117] In a further aspect, the invention can utilize an mTOR inhibitor other than RAD001 in an amount that is associated with a target trough level that is bioequivalent to the specified target trough level for RAD001. In an embodiment, the target trough level for an mTOR inhibitor other than RAD001, is a level that gives the same level of mTOR inhibition (e.g., as measured by a method described herein, e.g., the inhibition of P70 S6) as does a trough level of RAD001 described herein.

Pharmaceutical Compositions: mTOR Inhibitors

[1118] In one aspect, the present invention relates to pharmaceutical compositions comprising an mTOR inhibitor, e.g., an mTOR inhibitor as described herein, formulated for use in combination with CAR cells described herein.

[1119] In some embodiments, the mTOR inhibitor is formulated for administration in combination with an additional, e.g., as described herein.

[1120] In general, compounds of the invention will be administered in therapeutically effective amounts as described above via any of the usual and acceptable modes known in the art, either singly or in combination with one or more therapeutic agents.

[1121] The pharmaceutical formulations may be prepared using conventional dissolution and mixing procedures. For example, the bulk drug substance (e.g., an mTOR inhibitor or stabilized form of the compound (e.g., complex with a cyclodextrin derivative or other known complexation agent) is dissolved in a suitable solvent in the presence of one or more of the excipients described herein. The mTOR inhibitor is typically formulated into pharmaceutical dosage forms to provide an easily controllable dosage of the drug and to give the patient an elegant and easily handleable product.

[1122] Compounds of the invention can be administered as pharmaceutical compositions by any conventional route, in particular enterally, e.g., orally, e.g., in the form of tablets or capsules, or parenterally, e.g., in the form of injectable solutions or suspensions, topically, e.g., in the form of lotions, gels, ointments or creams, or in a nasal or suppository form. Where an mTOR inhibitor is administered in combination with (either simultaneously with or separately from) another agent as described herein, in one aspect, both components can be administered by the same route (e.g., parenterally). Alternatively, another agent may be administered by a different route relative to the mTOR inhibitor. For example, an mTOR inhibitor may be administered orally and the other agent may be administered parenterally.

### Sustained Release

[1123] mTOR inhibitors, e.g., allosteric mTOR inhibitors or catalytic mTOR inhibitors, disclosed herein can be provided as pharmaceutical formulations in form of oral solid dosage forms comprising an mTOR inhibitor disclosed herein, e.g., rapamycin or RAD001, which satisfy product stability requirements and/or have favorable pharmacokinetic properties over the immediate release (IR) tablets, such as reduced average plasma peak concentrations, reduced inter- and intra-patient variability in the extent of drug absorption and in the plasma peak concentration, reduced Cₘₐₓ/Cₘᵢₙ ratio and/or reduced food effects. Provided pharmaceutical formulations may allow for more precise dose adjustment and/or reduce frequency of adverse events thus providing safer treatments for patients with an mTOR inhibitor disclosed herein, e.g., rapamycin or RAD001.

[1124] In some embodiments, the present disclosure provides stable extended release formulations of an mTOR inhibitor disclosed herein, e.g., rapamycin or RAD001, which are multi-particulate systems and may have functional layers and coatings.

[1125] The term “extended release, multi-particulate formulation as used herein refers to a formulation which enables release of an mTOR inhibitor disclosed herein, e.g., rapamycin or RAD001, over an extended period of time e.g. over at least 1, 2, 3, 4, 5 or 6 hours. The extended release formulation may contain matrices and coatings made of special excipients, e.g., as described herein, which are formulated in a manner as to make the active ingredient available over an extended period of time following ingestion.

[1126] The term “extended release” can be interchangeably used with the terms “sustained release” (SR) or “prolonged release”. The term “extended release” relates to a pharmaceutical formulation that does not release active drug substance immediately after oral dosing but over an extended in accordance with the definition in the pharmacopoeias Ph. Eur. (7^{th} edition) mongraph for tablets and capsules and USP general chapter <1151> for pharmaceutical dosage forms. The term “Immediate Release” (IR) as used herein refers to a pharmaceutical formulation which releases 85% of the active drug substance within less than 60 minutes in accordance with the definition of “Guidance for Industry: “Dissolution Testing of Immediate Release Solid Oral Dosage Forms” (FDA CDER, 1997). In some embodiments, the term “immediate release” means release of everolismus from tablets within the time of 30 minutes, e.g., as measured in the dissolution assay described herein.

[1127] Stable extended release formulations of an mTOR inhibitor disclosed herein, e.g., rapamycin or RAD001, can be characterized by an in-vitro release profile using assays known in the art, such as a dissolution assay as described herein: a dissolution vessel filled with 900 mL phosphate buffer pH 6.8 containing sodium dodecyl sulfate 0.2% at 37° C. and the dissolution is performed using a paddle method at 75 rpm according to USP by according to USP testing monograph 711, and Ph.Eur. testing monograph 2.9.3. respectively.

[1128] In some embodiments, stable extended release formulations of an mTOR inhibitor disclosed herein, e.g., rapamycin or RAD001, release the mTOR inhibitor in the in-vitro release assay according to following release specifications:

[1129] 0.5 h: <45%, or <40, e.g., <30%

[1130] 1 h: 20-80%, e.g., 30-60%

[1131] 2 h: >50%, or >70%, e.g., >75%

[1132] 3 h: >60%, or >65%, e.g., >85%, e.g., >90%.

[1133] In some embodiments, stable extended release formulations of an mTOR inhibitor disclosed herein, e.g., rapamycin or RAD001, release 50% of the mTOR inhibitor not earlier than 45, 60, 75, 90, 105 min or 120 min in the in-vitro dissolution assay.

### Biopolymer Delivery Methods

[1134] In some embodiments, one or more CAR-expressing cells as disclosed herein can be administered or delivered to the subject via a biopolymer scaffold, e.g., a biopolymer implant. Biopolymer scaffolds can support or enhance the delivery, expansion, and/or dispersion of the CAR-expressing cells described herein. A biopolymer scaffold comprises a biocompatible (e.g., does not substantially induce an inflammatory or immune response) and/or a biodegradable polymer that can be naturally occurring or synthetic.

[1135] Examples of suitable biopolymers include, but are not limited to, agar, agarose, alginate, alginate/calcium phosphate cement (CPC), beta-galactosidase (β-GAL), (1, 2,3,4,6-pentaacetyl a-D-galactose), cellulose, chitin, chitosan, collagen, elastin, gelatin, hyaluronic acid collagen, hydroxyapatite, poly(3-hydroxybutyrate-co-3-hydroxy-hexanoate) (PHBHHx), poly(lactide), poly(caprolactone) (PCL), poly(lactide-co-glycolide) (PLG), polyethylene oxide (PEO), poly(lactic-co-glycolic acid) (PLGA), polypropylene oxide (PPO), polyvinyl alcohol) (PVA), silk, soy protein, and soy protein isolate, alone or in combination with any other polymer composition, in any concentration and in any ratio. The biopolymer can be augmented or modified with adhesion- or migration-promoting molecules, e.g., collagen-mimetic peptides that bind to the collagen receptor of lymphocytes, and/or stimulatory molecules to enhance the delivery, expansion, or function, e.g., anti-cancer activity, of the cells to be delivered. The biopolymer scaffold can be an injectable, e.g., a gel or a semi-solid, or a solid composition.

[1136] In some embodiments, CAR-expressing cells described herein are seeded onto the biopolymer scaffold prior to delivery to the subject. In embodiments, the biopolymer scaffold further comprises one or more additional therapeutic agents described herein (e.g., another CAR-expressing cell, an antibody, or a small molecule) or agents that enhance the activity of a CAR-expressing cell, e.g., incorporated or conjugated to the biopolymers of the scaffold. In embodiments, the biopolymer scaffold is injected, e.g., intratumorally, or surgically implanted at the tumor or within a proximity of the tumor sufficient to mediate an anti-tumor effect. Additional examples of biopolymer compositions and methods for their delivery are described in Stephan et al., Nature Biotechnology, 2015, 33:97-101; and WO2014/110591.

### Pharmaceutical Compositions and Treatments

[1137] Pharmaceutical compositions of the present invention may comprise an anti-target CAR-expressing cell, e.g., a plurality of anti-target CAR-expressing cells, as described herein, in combination with one or more pharmaceutically or physiologically acceptable carriers, diluents or excipients. Such compositions may comprise buffers such as neutral buffered saline, phosphate buffered saline and the like; carbohydrates such as glucose, mannose, sucrose or dextrans, mannitol; proteins; polypeptides or amino acids such as glycine; antioxidants; chelating agents such as EDTA or glutathione; adjuvants (e.g., aluminum hydroxide); and preservatives. Compositions of the present invention are in one aspect formulated for intravenous administration.

[1138] Pharmaceutical compositions of the present invention may be administered in a manner appropriate to the disease to be treated (or prevented). The quantity and frequency of administration will be determined by such factors as the condition of the patient, and the type and severity of the patient's disease, although appropriate dosages may be determined by clinical trials.

[1139] In one embodiment, the pharmaceutical composition is substantially free of, e.g., there are no detectable levels of a contaminant, e.g., selected from the group consisting of endotoxin, mycoplasma, replication competent lentivirus (RCL), p24, VSV-G nucleic acid, HIV gag, residual anti-CD3/anti-CD28 coated beads, mouse antibodies, pooled human serum, bovine serum albumin, bovine serum, culture media components, vector packaging cell or plasmid components, a bacterium and a fungus. In one embodiment, the bacterium is at least one selected from the group consisting of Alcaligenes faecalis, Candida albicans, Escherichia coli, Haemophilus influenza, Neisseria meningitides, Pseudomonas aeruginosa, Staphylococcus aureus, Streptococcus pneumonia, and Streptococcus pyogenes group A.

[1140] When “an immunologically effective amount,” “an anti-tumor effective amount,” “a tumor-inhibiting effective amount,” or “therapeutic amount” is indicated, the precise amount of the compositions of the present invention to be administered can be determined by a physician with consideration of individual differences in age, weight, tumor size, extent of infection or metastasis, and condition of the patient (subject). It can generally be stated that a pharmaceutical composition comprising the immune effector cells (e.g., T cells, NK cells) described herein may be administered at a dosage of 10⁴ to 10⁹ cells/kg body weight, in some instances 10⁵ to 10⁶ cells/kg body weight, including all integer values within those ranges. T cell compositions may also be administered multiple times at these dosages. The cells can be administered by using infusion techniques that are commonly known in immunotherapy (see, e.g., Rosenberg et al., New Eng. J. of Med. 319:1676, 1988).

[1141] In certain aspects, it may be desired to administer activated immune effector cells (e.g., T cells, NK cells) to a subject and then subsequently redraw blood (or have an apheresis performed), activate immune effector cells (e.g., T cells, NK cells) therefrom according to the present invention, and reinfuse the patient with these activated and expanded immune effector cells (e.g., T cells, NK cells). This process can be carried out multiple times every few weeks. In certain aspects, immune effector cells (e.g., T cells, NK cells) can be activated from blood draws of from 10 cc to 400 cc. In certain aspects, immune effector cells (e.g., T cells, NK cells) are activated from blood draws of 20 cc, 30 cc, 40 cc, 50 cc, 60 cc, 70 cc, 80 cc, 90 cc, or 100 cc.

[1142] The administration of the subject compositions may be carried out in any convenient manner, including by aerosol inhalation, injection, ingestion, transfusion, implantation or transplantation. The compositions described herein may be administered to a patient trans arterially, subcutaneously, intradermally, intratumorally, intranodally, intramedullary, intramuscularly, by intravenous (i.v.) injection, or intraperitoneally. In one aspect, the T cell compositions of the present invention are administered to a patient by intradermal or subcutaneous injection. In one aspect, the T cell compositions of the present invention are administered by i.v. injection. The compositions of immune effector cells (e.g., T cells, NK cells) may be injected directly into a tumor, lymph node, or site of infection.

[1143] In a particular exemplary aspect, subjects may undergo leukapheresis, wherein leukocytes are collected, enriched, or depleted ex vivo to select and/or isolate the cells of interest, e.g., T cells. These T cell isolates may be expanded by methods known in the art and treated such that one or more anti-target CAR constructs of the invention may be introduced, thereby creating a anti-target CAR T cell of the invention. Subjects in need thereof may subsequently undergo standard treatment with high dose chemotherapy followed by peripheral blood stem cell transplantation. In certain aspects, following or concurrent with the transplant, subjects receive an infusion of the expanded anti-target CAR T cells of the present invention. In an additional aspect, expanded cells are administered before or following surgery.

[1144] The dosage of the above treatments to be administered to a patient will vary with the precise nature of the condition being treated and the recipient of the treatment. The scaling of dosages for human administration can be performed according to art-accepted practices. The dose for CAMPATH, for example, will generally be in the range 1 to about 100 mg for an adult patient, usually administered daily for a period between 1 and 30 days. The preferred daily dose is 1 to 10 mg per day although in some instances larger doses of up to 40 mg per day may be used (described in U.S. Pat. No. 6,120,766).

[1145] In one embodiment, the anti-target CAR is introduced into immune effector cells (e.g., T cells, NK cells), e.g., using in vitro transcription, and the subject (e.g., human) receives an initial administration of anti-target CAR immune effector cells (e.g., T cells, NK cells) of the invention, and one or more subsequent administrations of the anti-target CAR immune effector cells (e.g., T cells, NK cells) of the invention, wherein the one or more subsequent administrations are administered less than 15 days, e.g., 14, 13, 12, 11, 10, 9, 8, 7, 6, 5, 4, 3, or 2 days after the previous administration. In one embodiment, more than one administration of the anti-target CAR immune effector cells (e.g., T cells, NK cells) of the invention are administered to the subject (e.g., human) per week, e.g., 2, 3, or 4 administrations of the anti-target CAR immune effector cells (e.g., T cells, NK cells) of the invention are administered per week. In one embodiment, the subject (e.g., human subject) receives more than one administration of the anti-target CAR immune effector cells (e.g., T cells, NK cells) per week (e.g., 2, 3 or 4 administrations per week) (also referred to herein as a cycle), followed by a week of no anti-target CAR immune effector cells (e.g., T cells, NK cells) administrations, and then one or more additional administration of the anti-target CAR immune effector cells (e.g., T cells, NK cells) (e.g., more than one administration of the anti-target CAR immune effector cells (e.g., T cells, NK cells) per week) is administered to the subject. In another embodiment, the subject (e.g., human subject) receives more than one cycle of anti-target CAR immune effector cells (e.g., T cells, NK cells), and the time between each cycle is less than 10, 9, 8, 7, 6, 5, 4, or 3 days. In one embodiment, the anti-target CAR immune effector cells (e.g., T cells, NK cells) are administered every other day for 3 administrations per week. In one embodiment, the anti-target CAR immune effector cells (e.g., T cells, NK cells) of the invention are administered for at least two, three, four, five, six, seven, eight or more weeks.

[1146] In one aspect, anti-target CAR-expressing cells of the present inventions are generated using lentiviral viral vectors, such as lentivirus. Cells, e.g., CARTs, generated that way will have stable anti-target CAR expression.

[1147] In one aspect, anti-target CAR-expressing cells, e.g., CARTs, are generated using a viral vector such as a gammaretroviral vector, e.g., a gammaretroviral vector described herein. CARTs generated using these vectors can have stable anti-target CAR expression.

[1148] In one aspect, CARTs transiently express anti-target CAR vectors for 4, 5, 6, 7, 8, 9, 10, 11, 12, 13, 14, 15 days after transduction. Transient expression of anti-target CARs can be effected by RNA anti-target CAR vector delivery. In one aspect, the anti-target CAR RNA is transduced into the T cell by electroporation.

[1149] A potential issue that can arise in patients being treated using transiently expressing anti-target CAR immune effector cells (e.g., T cells, NK cells) (particularly with murine scFv bearing CARTs) is anaphylaxis after multiple treatments.

[1150] Without being bound by this theory, it is believed that such an anaphylactic response might be caused by a patient developing humoral anti-anti-target CAR response, i.e., anti-anti-target CAR antibodies having an anti-IgE isotype. It is thought that a patient's antibody producing cells undergo a class switch from IgG isotype (that does not cause anaphylaxis) to IgE isotype when there is a ten to fourteen day break in exposure to antigen.

[1151] If a patient is at high risk of generating an anti-anti-target CAR antibody response during the course of transient anti-target CAR therapy (such as those generated by RNA transductions), CART infusion breaks should not last more than ten to fourteen days.

### EXAMPLES

[1152] The invention is further described in detail by reference to the following experimental examples. These examples are provided for purposes of illustration only, and are not intended to be limiting unless otherwise specified. Thus, the invention should in no way be construed as being limited to the following examples, but rather, should be construed to encompass any and all variations which become evident as a result of the teaching provided herein.

### Example 1: A Cellular Antidote to Specifically Deplete Anti-CD19 Chimeric Antigen Receptor (CAR19) Positive Cells

### Introduction

[1153] Anti-CD19 chimeric antigen receptor T cells (CART19, CTL019) have led to clinical responses in relapsing or refractory (r/r) B-cell acute lymphoblastic leukemia (B-ALL). With the approval of CTL019 for patients with B-ALL, increasing numbers of patients will be exposed to this therapy. A patient was reported who relapsed with CD19-negative, CAR19-expressing leukemia, likely due to inadvertent transduction of a leukemic cell with the CAR19 lentivirus during CTL019 manufacturing. The high expression of the CAR in leukemic cells and its absence from normal tissues make it a good engineered tumor target. Anti-CAR19 CAR T cells were therefore developed with the goal of specifically targeting CAR19+B-ALL.

### Methods

[1154] Two anti-CAR19 CAR using an anti-CAR19 idiotype scFv (clone 136.20.1, original clone kind gift of Dr. Laurence Cooper) testing two light chain orientations for the scFv: light to heavy (L2H) and heavy to light (H2L) were designed. We cloned the constructs into our standard backbone containing the CD8 hinge and trans-membrane domains, 4-1BB costimulatory and CD3z signaling domain. The constructs were packaged into a lentiviral vector and used to transduce normal donor T cells. As target cells, we used ex-vivo expanded primary leukemic blasts from the CAR19+ relapsed patient (CHP-107), as well as a luciferized B-ALL cell line (NALM6) transduced with the full-length CAR19 used in our clinical studies. Of note, the expression of CAR19 in CD19+ NALM\hat{ } cells led to apparent loss of CD19 by flow cytometry. We tested CART function in vitro with luciferase-based killing assays, and in vivo in human xenograft models using NOD-SCID gamma chain deficient (NSG) mice.

### Results

[1155] Both L2H and H2L anti-CAR19 CAR were efficiently expressed on T cells as detected by flow cytometry. In vitro CART-CAR19 efficiently killed CAR19+B-ALL (NALM6) (L2H orientation: p<0.0001; H2L: p=0.0063) but not wild-type (WT) (p=NS). NALM6 (FIG. 1A). We compared the in vivo growth rate of CAR19+ NALM6 versus WT and did not observe any difference. Next, we tested our lead anti-CAR19 CART (L2H) in vivo. NSG mice were engrafted with either CAR19+ NALM6 (CD19-) or luciferase-positive relapsed CHP107 leukemia blasts (CAR19+, CD19-). At day 7 or 14 mice were randomized to receive no treatment, control T cells (UTD), CART19 or CART-CAR19 L2H. In both xenograft models, CART19 and UTD cells were not able to control disease progression. In contrast, CART-CAR19 L2H cells showed leukemia control in the CHP107R xenograft model (FIG. 1B).

### CONCLUSIONS

[1156] The acquisition of CAR expression by leukemic cells during CART manufacturing is a rare event that can lead to loss of CD19 expression, and potential resistance to CD19-directed immunotherapy. However, the CAR becomes a tumor-specific antigen that can be targeted specifically without any off-target toxicity. Here we report for the first time, a proof-of-concept that the mechanism of immunoescape by leukemia can be used as a point of vulnerability. This finding also supports the use of anti-CAR19 CART as an “antidote” to CAR19 T cells for those patients who have been in deep leukemia remission for several years but still suffer B cell aplasia.

### Example 2: Anti-CAR CART to Deplete CART19

[1157] This Example describes the use of anti-CAR CART cells to deplete CART19 expressing cells. Without wishing to be bound by theory, in some embodiments, CART19 cells can, e.g., target or kill cells expressing anti-CAR CART expressing cells. Accordingly, this experiment was designed to test the optimal ratio of anti-target CAR cells: target CAR cells.

[1158] Normal donor T cells were used to generate CART cells using standard protocols and lentivirus encoding the different constructs as described below. Cells were transduced with constructs expressing anti-CAR CART (clones c3025 (anti-CAR19 CAR H2L) or c3026 (anti-CAR19 CAR L2H)), CART19 (c2228; FMC63) or CART22 (c2270; m971). Transduction efficiencies were normalized by CAR expression. Cells expressing anti-CAR CART were labeled with CFSE, and cells expressing CART19 or CART22 were labeled with Cell tracker violet (CTV). The two CART expressing populations, e.g., anti-CAR CART population and CART19 population; or anti-CAR CART population and CART22 population, were co-cultured and relative killing was measured by flow cytometry. The cells were co-cultured at different ratios and the ratio of CFSE:CTV signal was assessed by flow cytometry at 24 and 48 hours as indicated in FIGS. 2A-2D.

[1159] The data depicted in FIGS. 2A-2D show the importance of dosing of the anti-CAR CART as compared to CART19 expressing cells. The results demonstrate that, in some embodiments, a minimum ratio of 1:1 of anti-CAR-CART cells: target CART cells is required to allow anti-CAR CART cells to persist, e.g., prevail over, CART19 cells.

### EQUIVALENTS

[1160] The disclosures of each and every patent, patent application, and publication cited herein are hereby incorporated herein by reference in their entirety. While this invention has been disclosed with reference to specific aspects, it is apparent that other aspects and variations of this invention may be devised by others skilled in the art without departing from the true spirit and scope of the invention. The appended claims are intended to be construed to include all such aspects and equivalent variations.

The application's sequence listing, which the Patent Office published only in electronic form, follows.

SEQUENCE LISTING (2028 sequences)

SEQ ID NO: 1-9 - skipped (9 entries)

SEQ ID NO: 10 - protein, 10 aa, Artificial Sequence
  source: /note="Description of Artificial Sequence: Synthetic peptide"
GGGGSGGGGS

SEQ ID NO: 11 - DNA, 30 bp, Artificial Sequence
  source: /note="Description of Artificial Sequence: Synthetic oligonucleotide"
ggtggcggaggttctggaggtggaggttcc

SEQ ID NO: 12 - protein, 24 aa, Artificial Sequence
  source: /note="Description of Artificial Sequence: Synthetic peptide"
IYIWAPLAGTCGVLLLSLVITLYC

SEQ ID NO: 13 - DNA, 72 bp, Artificial Sequence
  source: /note="Description of Artificial Sequence: Synthetic oligonucleotide"
atctacatctgggcgcccttggccgggacttgtggggtccttctcctgtcactggttatcaccctttactgc

SEQ ID NO: 14 - protein, 42 aa, Artificial Sequence
  source: /note="Description of Artificial Sequence: Synthetic polypeptide"
KRGRKKLLYIFKQPFMRPVQTTQEEDGCSCRFPEEEEGGCEL

SEQ ID NO: 15 - DNA, 126 bp, Artificial Sequence
  source: /note="Description of Artificial Sequence: Synthetic polynucleotide"
aaacggggcagaaagaaactcctgtatatattcaaacaaccatttatgagaccagtacaaactactcaagaggaagatggctgtagctgccgatttccagaagaagaagaaggaggatgtgaactg

SEQ ID NO: 16 - protein, 48 aa, Artificial Sequence
  source: /note="Description of Artificial Sequence: Synthetic polypeptide"
QRRKYRSNKGESPVEPAEPCRYSCPREEEGSTIPIQEDYRKPEPACSP

SEQ ID NO: 17 - DNA, 123 bp, Artificial Sequence
  source: /note="Description of Artificial Sequence: Synthetic polynucleotide"
aggagtaagaggagcaggctcctgcacagtgactacatgaacatgactccccgccgccccgggcccacccgcaagcattaccagccctatgccccaccacgcgacttcgcagcctatcgctcc

SEQ ID NO: 18 - protein, 112 aa, Artificial Sequence
  source: /note="Description of Artificial Sequence: Synthetic polypeptide"
RVKFSRSADAPAYKQGQNQLYNELNLGRREEYDVLDKRRGRDPEMGGKPRRKNPQEGLYNELQKDKMAEAYSEIGMKGERRRGKGHDGLYQGLSTATKDTYDALHMQALPPR

SEQ ID NO: 19 - DNA, 336 bp, Artificial Sequence
  source: /note="Description of Artificial Sequence: Synthetic polynucleotide"
agagtgaagttcagcaggagcgcagacgcccccgcgtacaagcagggccagaaccagctctataacgagctcaatctaggacgaagagaggagtacgatgttttggacaagagacgtggccgggaccctgagatggggggaaagccgagaaggaagaaccctcaggaaggcctgtacaatgaactgcagaaagataagatggcggaggcctacagtgagattgggatgaaaggcgagcgccggaggggcaaggggcacgatggcctttaccagggtctcagtacagccaccaaggacacctacgacgcccttcacatgcaggccctgccccctcgc

SEQ ID NO: 20 - protein, 112 aa, Artificial Sequence
  source: /note="Description of Artificial Sequence: Synthetic polypeptide"
RVKFSRSADAPAYQQGQNQLYNELNLGRREEYDVLDKRRGRDPEMGGKPRRKNPQEGLYNELQKDKMAEAYSEIGMKGERRRGKGHDGLYQGLSTATKDTYDALHMQALPPR

SEQ ID NO: 21 - DNA, 336 bp, Artificial Sequence
  source: /note="Description of Artificial Sequence: Synthetic polynucleotide"
agagtgaagttcagcaggagcgcagacgcccccgcgtaccagcagggccagaaccagctctataacgagctcaatctaggacgaagagaggagtacgatgttttggacaagagacgtggccgggaccctgagatggggggaaagccgagaaggaagaaccctcaggaaggcctgtacaatgaactgcagaaagataagatggcggaggcctacagtgagattgggatgaaaggcgagcgccggaggggcaaggggcacgatggcctttaccagggtctcagtacagccaccaaggacacctacgacgcccttcacatgcaggccctgccccctcgc

SEQ ID NO: 22 - protein, 5 aa, Artificial Sequence
  source: /note="Description of Artificial Sequence: Synthetic peptide"
GGGGS

SEQ ID NO: 23 - DNA, 30 bp, Artificial Sequence; identical to SEQ ID NO: 11
  source: /note="Description of Artificial Sequence: Synthetic oligonucleotide"

SEQ ID NO: 24 - protein, 150 aa, Artificial Sequence [sequence omitted]

SEQ ID NO: 25 - DNA, 450 bp, Artificial Sequence
  source: /note="Description of Artificial Sequence: Synthetic polynucleotide"
cccggatggtttctggactctccggatcgcccgtggaatcccccaaccttctcaccggcactcttggttgtgactgagggcgataatgcgaccttcacgtgctcgttctccaacacctccgaatcattcgtgctgaactggtaccgcatgagcccgtcaaaccagaccgacaagctcgccgcgtttccggaagatcggtcgcaaccgggacaggattgtcggttccgcgtgactcaactgccgaatggcagagacttccacatgagcgtggtccgcgctaggcgaaacgactccgggacctacctgtgcggagccatctcgctggcgcctaaggcccaaatcaaagagagcttgagggccgaactgagagtgaccgagcgcagagctgaggtgccaactgcacatccatccccatcgcctcggcctgcggggcagtttcagaccctggtc

SEQ ID NO: 26 - protein, 394 aa, Artificial Sequence
  source: /note="Description of Artificial Sequence: Synthetic polypeptide"
MALPVTALLLPLALLLHAARPPGWFLDSPDRPWNPPTFSPALLVVTEGDNATFTCSFSNTSESFVLNWYRMSPSNQTDKLAAFPEDRSQPGQDCRFRVTQLPNGRDFHMSVVRARRNDSGTYLCGAISLAPKAQIKESLRAELRVTERRAEVPTAHPSPSPRPAGQFQTLVTTTPAPRPPTPAPTIASQPLSLRPEACRPAAGGAVHTRGLDFACDIYIWAPLAGTCGVLLLSLVITLYCKRGRKKLLYIFKQPFMRPVQTTQEEDGCSCRFPEEEEGGCELRVKFSRSADAPAYKQGQNQLYNELNLGRREEYDVLDKRRGRDPEMGGKPRRKNPQEGLYNELQKDKMAEAYSEIGMKGERRRGKGHDGLYQGLSTATKDTYDALHMQALPPR

SEQ ID NO: 27 - DNA, 1182 bp, Artificial Sequence
  source: /note="Description of Artificial Sequence: Synthetic polynucleotide"
atggccctccctgtcactgccctgcttctccccctcgcactcctgctccacgccgctagaccacccggatggtttctggactctccggatcgcccgtggaatcccccaaccttctcaccggcactcttggttgtgactgagggcgataatgcgaccttcacgtgctcgttctccaacacctccgaatcattcgtgctgaactggtaccgcatgagcccgtcaaaccagaccgacaagctcgccgcgtttccggaagatcggtcgcaaccgggacaggattgtcggttccgcgtgactcaactgccgaatggcagagacttccacatgagcgtggtccgcgctaggcgaaacgactccgggacctacctgtgcggagccatctcgctggcgcctaaggcccaaatcaaagagagcttgagggccgaactgagagtgaccgagcgcagagctgaggtgccaactgcacatccatccccatcgcctcggcctgcggggcagtttcagaccctggtcacgaccactccggcgccgcgcccaccgactccggccccaactatcgcgagccagcccctgtcgctgaggccggaagcatgccgccctgccgccggaggtgctgtgcatacccggggattggacttcgcatgcgacatctacatttgggctcctctcgccggaacttgtggcgtgctccttctgtccctggtcatcaccctgtactgcaagcggggtcggaaaaagcttctgtacattttcaagcagcccttcatgaggcccgtgcaaaccacccaggaggaggacggttgctcctgccggttccccgaagaggaagaaggaggttgcgagctgcgcgtgaagttctcccggagcgccgacgcccccgcctataagcagggccagaaccagctgtacaacgaactgaacctgggacggcgggaagagtacgatgtgctggacaagcggcgcggccgggaccccgaaatgggcgggaagcctagaagaaagaaccctcaggaaggcctgtataacgagctgcagaaggacaagatggccgaggcctactccgaaattgggatgaagggagagcggcggaggggaaaggggcacgacggcctgtaccaaggactgtccaccgccaccaaggacacatacgatgccctgcacatgcaggcccttccccctcgc

SEQ ID NO: 28 - protein, 40 aa, Artificial Sequence
  source: /note="Description of Artificial Sequence: Synthetic polypeptide"
  SITE (1)..(40): /note="This sequence may encompass 1-10 'Gly Gly Gly Ser' repeating units"
GGGSGGGSGGGSGGGSGGGSGGGSGGGSGGGSGGGSGGGS

SEQ ID NO: 29 - protein, 20 aa, Artificial Sequence
  source: /note="Description of Artificial Sequence: Synthetic peptide"
GGGGSGGGGSGGGGSGGGGS

SEQ ID NO: 30 - protein, 15 aa, Artificial Sequence
  source: /note="Description of Artificial Sequence: Synthetic peptide"
GGGGSGGGGSGGGGS

SEQ ID NO: 31 - protein, 4 aa, Artificial Sequence
  source: /note="Description of Artificial Sequence: Synthetic peptide"
GGGS

SEQ ID NO: 32 - DNA, 2000 bp, Artificial Sequence
  source: /note="Description of Artificial Sequence: Synthetic polynucleotide"
  misc_feature (1)..(2000): /note="This sequence may encompass 50-2000 nucleotides"
aaaaaaaaaaaaaaaaaaaaaaaaaaaaaaaaaaaaaaaaaaaaaaaaaaaaaaaaaaaaaaaaaaaaaaaaaaaaaaaaaaaaaaaaaaaaaaaaaaaaaaaaaaaaaaaaaaaaaaaaaaaaaaaaaaaaaaaaaaaaaaaaaaaaaaaaaaaaaaaaaaaaaaaaaaaaaaaaaaaaaaaaaaaaaaaaaaaaaaaaaaaaaaaaaaaaaaaaaaaaaaaaaaaaaaaaaaaaaaaaaaaaaaaaaaaaaaaaaaaaaaaaaaaaaaaaaaaaaaaaaaaaaaaaaaaaaaaaaaaaaaaaaaaaaaaaaaaaaaaaaaaaaaaaaaaaaaaaaaaaaaaaaaaaaaaaaaaaaaaaaaaaaaaaaaaaaaaaaaaaaaaaaaaaaaaaaaaaaaaaaaaaaaaaaaaaaaaaaaaaaaaaaaaaaaaaaaaaaaaaaaaaaaaaaaaaaaaaaaaaaaaaaaaaaaaaaaaaaaaaaaaaaaaaaaaaaaaaaaaaaaaaaaaaaaaaaaaaaaaaaaaaaaaaaaaaaaaaaaaaaaaaaaaaaaaaaaaaaaaaaaaaaaaaaaaaaaaaaaaaaaaaaaaaaaaaaaaaaaaaaaaaaaaaaaaaaaaaaaaaaaaaaaaaaaaaaaaaaaaaaaaaaaaaaaaaaaaaaaaaaaaaaaaaaaaaaaaaaaaaaaaaaaaaaaaaaaaaaaaaaaaaaaaaaaaaaaaaaaaaaaaaaaaaaaaaaaaaaaaaaaaaaaaaaaaaaaaaaaaaaaaaaaaaaaaaaaaaaaaaaaaaaaaaaaaaaaaaaaaaaaaaaaaaaaaaaaaaaaaaaaaaaaaaaaaaaaaaaaaaaaaaaaaaaaaaaaaaaaaaaaaaaaaaaaaaaaaaaaaaaaaaaaaaaaaaaaaaaaaaaaaaaaaaaaaaaaaaaaaaaaaaaaaaaaaaaaaaaaaaaaaaaaaaaaaaaaaaaaaaaaaaaaaaaaaaaaaaaaaaaaaaaaaaaaaaaaaaaaaaaaaaaaaaaaaaaaaaaaaaaaaaaaaaaaaaaaaaaaaaaaaaaaaaaaaaaaaaaaaaaaaaaaaaaaaaaaaaaaaaaaaaaaaaaaaaaaaaaaaaaaaaaaaaaaaaaaaaaaaaaaaaaaaaaaaaaaaaaaaaaaaaaaaaaaaaaaaaaaaaaaaaaaaaaaaaaaaaaaaaaaaaaaaaaaaaaaaaaaaaaaaaaaaaaaaaaaaaaaaaaaaaaaaaaaaaaaaaaaaaaaaaaaaaaaaaaaaaaaaaaaaaaaaaaaaaaaaaaaaaaaaaaaaaaaaaaaaaaaaaaaaaaaaaaaaaaaaaaaaaaaaaaaaaaaaaaaaaaaaaaaaaaaaaaaaaaaaaaaaaaaaaaaaaaaaaaaaaaaaaaaaaaaaaaaaaaaaaaaaaaaaaaaaaaaaaaaaaaaaaaaaaaaaaaaaaaaaaaaaaaaaaaaaaaaaaaaaaaaaaaaaaaaaaaaaaaaaaaaaaaaaaaaaaaaaaaaaaaaaaaaaaaaaaaaaaaaaaaaaaaaaaaaaaaaaaaaaaaaaaaaaaaaaaaaaaaaaaaaaaaaaaaaaaaaaaaaaaaaaaaaaaaaaaaaaaaaaaaaaaaaaaaaaaaaaaaaaaaaaaaaaaaaaaaaaaaaaaaaaaaaaaaaaaaaaaaaaaaaaaaaaaaaaaaaaaaaaaaaaaaaaaaaaaaaaaaaaaaaaaaaaaaaaaaaaaaaaaaaaaaaaaaaaaaaaaaaaaaaaaaaaaaaaaaaaaaaaaaaaaaaaaaaaaaaaaaaaaaaaaaaaaaaaaaaaaaaaaaaaaaaaaaaaaaaaaaaaaaaaaaaaaaaaaaaaaaaaaaaaaaaaaaaaaaaaaaaaaaaaaaaaaaaaaaaaaaaaaaaaaaaaaaaaaaaaaaaaaaaaaaaaaaaaaaaaaaaaaaaaaaaaaaaaaaaaaaaaaaaaaaaaaaaaaaaaaaaaaaaaaaaaaaaaaaaaaaaaaaaaaaaaaaaaaaaaaaaaaaaaa

SEQ ID NO: 33 - DNA, 150 bp, Artificial Sequence
  source: /note="Description of Artificial Sequence: Synthetic polynucleotide"
aaaaaaaaaaaaaaaaaaaaaaaaaaaaaaaaaaaaaaaaaaaaaaaaaaaaaaaaaaaaaaaaaaaaaaaaaaaaaaaaaaaaaaaaaaaaaaaaaaaaaaaaaaaaaaaaaaaaaaaaaaaaaaaaaaaaaaaaaaaaaaaaaaaaaa

SEQ ID NO: 34 - DNA, 5000 bp, Artificial Sequence
  source: /note="Description of Artificial Sequence: Synthetic polynucleotide"
  misc_feature (1)..(5000): /note="This sequence may encompass 50-5000 nucleotides"
  source: /note="See specification as filed for detailed description of substitutions and preferred embodiments"
aaaaaaaaaaaaaaaaaaaaaaaaaaaaaaaaaaaaaaaaaaaaaaaaaaaaaaaaaaaaaaaaaaaaaaaaaaaaaaaaaaaaaaaaaaaaaaaaaaaaaaaaaaaaaaaaaaaaaaaaaaaaaaaaaaaaaaaaaaaaaaaaaaaaaaaaaaaaaaaaaaaaaaaaaaaaaaaaaaaaaaaaaaaaaaaaaaaaaaaaaaaaaaaaaaaaaaaaaaaaaaaaaaaaaaaaaaaaaaaaaaaaaaaaaaaaaaaaaaaaaaaaaaaaaaaaaaaaaaaaaaaaaaaaaaaaaaaaaaaaaaaaaaaaaaaaaaaaaaaaaaaaaaaaaaaaaaaaaaaaaaaaaaaaaaaaaaaaaaaaaaaaaaaaaaaaaaaaaaaaaaaaaaaaaaaaaaaaaaaaaaaaaaaaaaaaaaaaaaaaaaaaaaaaaaaaaaaaaaaaaaaaaaaaaaaaaaaaaaaaaaaaaaaaaaaaaaaaaaaaaaaaaaaaaaaaaaaaaaaaaaaaaaaaaaaaaaaaaaaaaaaaaaaaaaaaaaaaaaaaaaaaaaaaaaaaaaaaaaaaaaaaaaaaaaaaaaaaaaaaaaaaaaaaaaaaaaaaaaaaaaaaaaaaaaaaaaaaaaaaaaaaaaaaaaaaaaaaaaaaaaaaaaaaaaaaaaaaaaaaaaaaaaaaaaaaaaaaaaaaaaaaaaaaaaaaaaaaaaaaaaaaaaaaaaaaaaaaaaaaaaaaaaaaaaaaaaaaaaaaaaaaaaaaaaaaaaaaaaaaaaaaaaaaaaaaaaaaaaaaaaaaaaaaaaaaaaaaaaaaaaaaaaaaaaaaaaaaaaaaaaaaaaaaaaaaaaaaaaaaaaaaaaaaaaaaaaaaaaaaaaaaaaaaaaaaaaaaaaaaaaaaaaaaaaaaaaaaaaaaaaaaaaaaaaaaaaaaaaaaaaaaaaaaaaaaaaaaaaaaaaaaaaaaaaaaaaaaaaaaaaaaaaaaaaaaaaaaaaaaaaaaaaaaaaaaaaaaaaaaaaaaaaaaaaaaaaaaaaaaaaaaaaaaaaaaaaaaaaaaaaaaaaaaaaaaaaaaaaaaaaaaaaaaaaaaaaaaaaaaaaaaaaaaaaaaaaaaaaaaaaaaaaaaaaaaaaaaaaaaaaaaaaaaaaaaaaaaaaaaaaaaaaaaaaaaaaaaaaaaaaaaaaaaaaaaaaaaaaaaaaaaaaaaaaaaaaaaaaaaaaaaaaaaaaaaaaaaaaaaaaaaaaaaaaaaaaaaaaaaaaaaaaaaaaaaaaaaaaaaaaaaaaaaaaaaaaaaaaaaaaaaaaaaaaaaaaaaaaaaaaaaaaaaaaaaaaaaaaaaaaaaaaaaaaaaaaaaaaaaaaaaaaaaaaaaaaaaaaaaaaaaaaaaaaaaaaaaaaaaaaaaaaaaaaaaaaaaaaaaaaaaaaaaaaaaaaaaaaaaaaaaaaaaaaaaaaaaaaaaaaaaaaaaaaaaaaaaaaaaaaaaaaaaaaaaaaaaaaaaaaaaaaaaaaaaaaaaaaaaaaaaaaaaaaaaaaaaaaaaaaaaaaaaaaaaaaaaaaaaaaaaaaaaaaaaaaaaaaaaaaaaaaaaaaaaaaaaaaaaaaaaaaaaaaaaaaaaaaaaaaaaaaaaaaaaaaaaaaaaaaaaaaaaaaaaaaaaaaaaaaaaaaaaaaaaaaaaaaaaaaaaaaaaaaaaaaaaaaaaaaaaaaaaaaaaaaaaaaaaaaaaaaaaaaaaaaaaaaaaaaaaaaaaaaaaaaaaaaaaaaaaaaaaaaaaaaaaaaaaaaaaaaaaaaaaaaaaaaaaaaaaaaaaaaaaaaaaaaaaaaaaaaaaaaaaaaaaaaaaaaaaaaaaaaaaaaaaaaaaaaaaaaaaaaaaaaaaaaaaaaaaaaaaaaaaaaaaaaaaaaaaaaaaaaaaaaaaaaaaaaaaaaaaaaaaaaaaaaaaaaaaaaaaaaaaaaaaaaaaaaaaaaaaaaaaaaaaaaaaaaaaaaaaaaaaaaaaaaaaaaaaaaaaaaaaaaaaaaaaaaaaaaaaaaaaaaaaaaaaaaaaaaaaaaaaaaaaaaaaaaaaaaaaaaaaaaaaaaaaaaaaaaaaaaaaaaaaaaaaaaaaaaaaaaaaaaaaaaaaaaaaaaaaaaaaaaaaaaaaaaaaaaaaaaaaaaaaaaaaaaaaaaaaaaaaaaaaaaaaaaaaaaaaaaaaaaaaaaaaaaaaaaaaaaaaaaaaaaaaaaaaaaaaaaaaaaaaaaaaaaaaaaaaaaaaaaaaaaaaaaaaaaaaaaaaaaaaaaaaaaaaaaaaaaaaaaaaaaaaaaaaaaaaaaaaaaaaaaaaaaaaaaaaaaaaaaaaaaaaaaaaaaaaaaaaaaaaaaaaaaaaaaaaaaaaaaaaaaaaaaaaaaaaaaaaaaaaaaaaaaaaaaaaaaaaaaaaaaaaaaaaaaaaaaaaaaaaaaaaaaaaaaaaaaaaaaaaaaaaaaaaaaaaaaaaaaaaaaaaaaaaaaaaaaaaaaaaaaaaaaaaaaaaaaaaaaaaaaaaaaaaaaaaaaaaaaaaaaaaaaaaaaaaaaaaaaaaaaaaaaaaaaaaaaaaaaaaaaaaaaaaaaaaaaaaaaaaaaaaaaaaaaaaaaaaaaaaaaaaaaaaaaaaaaaaaaaaaaaaaaaaaaaaaaaaaaaaaaaaaaaaaaaaaaaaaaaaaaaaaaaaaaaaaaaaaaaaaaaaaaaaaaaaaaaaaaaaaaaaaaaaaaaaaaaaaaaaaaaaaaaaaaaaaaaaaaaaaaaaaaaaaaaaaaaaaaaaaaaaaaaaaaaaaaaaaaaaaaaaaaaaaaaaaaaaaaaaaaaaaaaaaaaaaaaaaaaaaaaaaaaaaaaaaaaaaaaaaaaaaaaaaaaaaaaaaaaaaaaaaaaaaaaaaaaaaaaaaaaaaaaaaaaaaaaaaaaaaaaaaaaaaaaaaaaaaaaaaaaaaaaaaaaaaaaaaaaaaaaaaaaaaaaaaaaaaaaaaaaaaaaaaaaaaaaaaaaaaaaaaaaaaaaaaaaaaaaaaaaaaaaaaaaaaaaaaaaaaaaaaaaaaaaaaaaaaaaaaaaaaaaaaaaaaaaaaaaaaaaaaaaaaaaaaaaaaaaaaaaaaaaaaaaaaaaaaaaaaaaaaaaaaaaaaaaaaaaaaaaaaaaaaaaaaaaaaaaaaaaaaaaaaaaaaaaaaaaaaaaaaaaaaaaaaaaaaaaaaaaaaaaaaaaaaaaaaaaaaaaaaaaaaaaaaaaaaaaaaaaaaaaaaaaaaaaaaaaaaaaaaaaaaaaaaaaaaaaaaaaaaaaaaaaaaaaaaaaaaaaaaaaaaaaaaaaaaaaaaaaaaaaaaaaaaaaaaaaaaaaaaaaaaaaaaaaaaaaaaaaaaaaaaaaaaaaaaaaaaaaaaaaaaaaaaaaaaaaaaaaaaaaaaaaaaaaaaaaaaaaaaaaaaaaaaaaaaaaaaaaaaaaaaaaaaaaaaaaaaaaaaaaaaaaaaaaaaaaaaaaaaaaaaaaaaaaaaaaaaaaaaaaaaaaaaaaaaaaaaaaaaaaaaaaaaaaaaaaaaaaaaaaaaaaaaaaaaaaaaaaaaaaaaaaaaaaaaaaaaaaaaaaaaaaaaaaaaaaaaaaaaaaaaaaaaaaaaaaaaaaaaaaaaaaaaaaaaaaaaaaaaaaaaaaaaaaaaaaaaaaaaaaaaaaaaaaaaaaaaaaaaaaaaaaaaaaaaaaaaaaaaaaaaaaaaaaaaaaaaaaaaaaaaaaaaaaaaaaaaaaaaaaaaaaaaaaaaaaaaaaaaaaaaaaaaaaaaaaaaaaaaaaaaaaaaaaaaaaaaaaaaaaaaaaaaaaaaaaaaaaaaaaaaaaaaaaaaaaaaaaaaaaaaaaaaaaaaaaaaaaaaaaaaaaaaaaaaaaaaaaaaaaaaaaaaaaaaaaaaaaaaaaaaaaaaaaaaaaaaaaaaaaaaaaaaaaaaaaaaaaaaaaaaaaaaaaaaaaaaaaaaaaaaaaaaaaaaaaaaaaaaaaaaaaaaaaaaaaaaaaaaaaaaaaaaaaaaaaaaaaaaaaaaaaaaaaaaaaaaaaaaaaaaaaaaaaaaaaaaaaaaaaaaaaaaaaaaaaaaaaaaaaaaaaaaaaaaaaaaaaaaaaaaaaaaaaaaaaaaaaaaaaaaaaaaaaaaaaaaaaaaaaaaaaaaaaaaaaaaaaaaaaaaaaaaaaaaaaaaaaaaaaaaaaaaaaaaaaaaaaaaaaaaaaaaaaaaaaaaaaaaaaaaaaaaaaaaaaaaaaaaaaaaaaaaaaaaaaaaaaaaaaaaaaaaaaaaaaaaaaaaaaaaaaaaaaaaaaaaaaaaaaaaaaaaaaaaaaaaaaaaaaaaaaaaaaaaaaaaaaaaaaaaaaaaaaaaaaaaaaaaaaaaaaaaaaaaaaaaaaaaaaaaaaaaaaaaaaaaaaaaaaaaaaaaaaaaaaaaaaaaaaaaaaaaaaaaaaaaaaaaaaaaaaaaaaaaaaaaaaaaaaaaaaaaaaaaaaaaaaaaaaaaaaaaaaaaaaaaaaaaaaaaaaaaaaaaaaaaaaaaaaaaaaaaaaaaaaaaaaaaaaaaaaaaaaaaaaaaaaaaaaaaaaaaaaaaaaaaaaaaaaaaaaaaaaaaaaaaaaaaaaaaaaaaaaaaaaaaaaaaaaaaaaaaaaaaaaaaaaaaaaaaaaaaaaaaaaaaaaaaaaaaaaaaaaaaaaaaaaaaaaaaaaaaaaaaaaaaaaaaaaaaaaaaaaaaaaaaaaaaaaaaaaaaaaaaaaaaaaaaaaaaaaaaaaaaaaaaaaaaaaaaaaaaaaaaaaaaaaaaaaaaaaaaaaaaaaaaaaaaaaaaaaaaaaaaaaaaaaaaaaaaaaaaaaaaaaaaaaaaaaaaaaaaaaaaaaaaaaaaaaaaaaaaaaaaaaaaaaaaaaaaaaaaaaaaaaaaaaaaaaaaaaaaaaaaaaaaaaaaaaaaaaaaaaaaaaaaaaaaaaaaaaaaaaaaaaaaaaaaaaaaaaaaaaaaaaaaaaaaaaaaaaaaaaaaaaaaaaaaaaaaaaaaaaaaaaaaaaa

SEQ ID NO: 35 - DNA, 100 bp, Artificial Sequence
  source: /note="Description of Artificial Sequence: Synthetic polynucleotide"
tttttttttttttttttttttttttttttttttttttttttttttttttttttttttttttttttttttttttttttttttttttttttttttttttttt

SEQ ID NO: 36 - DNA, 5000 bp, Artificial Sequence
  source: /note="Description of Artificial Sequence: Synthetic polynucleotide"
  misc_feature (1)..(5000): /note="This sequence may encompass 50-5000 nucleotides"
  source: /note="See specification as filed for detailed description of substitutions and preferred embodiments"
tttttttttttttttttttttttttttttttttttttttttttttttttttttttttttttttttttttttttttttttttttttttttttttttttttttttttttttttttttttttttttttttttttttttttttttttttttttttttttttttttttttttttttttttttttttttttttttttttttttttttttttttttttttttttttttttttttttttttttttttttttttttttttttttttttttttttttttttttttttttttttttttttttttttttttttttttttttttttttttttttttttttttttttttttttttttttttttttttttttttttttttttttttttttttttttttttttttttttttttttttttttttttttttttttttttttttttttttttttttttttttttttttttttttttttttttttttttttttttttttttttttttttttttttttttttttttttttttttttttttttttttttttttttttttttttttttttttttttttttttttttttttttttttttttttttttttttttttttttttttttttttttttttttttttttttttttttttttttttttttttttttttttttttttttttttttttttttttttttttttttttttttttttttttttttttttttttttttttttttttttttttttttttttttttttttttttttttttttttttttttttttttttttttttttttttttttttttttttttttttttttttttttttttttttttttttttttttttttttttttttttttttttttttttttttttttttttttttttttttttttttttttttttttttttttttttttttttttttttttttttttttttttttttttttttttttttttttttttttttttttttttttttttttttttttttttttttttttttttttttttttttttttttttttttttttttttttttttttttttttttttttttttttttttttttttttttttttttttttttttttttttttttttttttttttttttttttttttttttttttttttttttttttttttttttttttttttttttttttttttttttttttttttttttttttttttttttttttttttttttttttttttttttttttttttttttttttttttttttttttttttttttttttttttttttttttttttttttttttttttttttttttttttttttttttttttttttttttttttttttttttttttttttttttttttttttttttttttttttttttttttttttttttttttttttttttttttttttttttttttttttttttttttttttttttttttttttttttttttttttttttttttttttttttttttttttttttttttttttttttttttttttttttttttttttttttttttttttttttttttttttttttttttttttttttttttttttttttttttttttttttttttttttttttttttttttttttttttttttttttttttttttttttttttttttttttttttttttttttttttttttttttttttttttttttttttttttttttttttttttttttttttttttttttttttttttttttttttttttttttttttttttttttttttttttttttttttttttttttttttttttttttttttttttttttttttttttttttttttttttttttttttttttttttttttttttttttttttttttttttttttttttttttttttttttttttttttttttttttttttttttttttttttttttttttttttttttttttttttttttttttttttttttttttttttttttttttttttttttttttttttttttttttttttttttttttttttttttttttttttttttttttttttttttttttttttttttttttttttttttttttttttttttttttttttttttttttttttttttttttttttttttttttttttttttttttttttttttttttttttttttttttttttttttttttttttttttttttttttttttttttttttttttttttttttttttttttttttttttttttttttttttttttttttttttttttttttttttttttttttttttttttttttttttttttttttttttttttttttttttttttttttttttttttttttttttttttttttttttttttttttttttttttttttttttttttttttttttttttttttttttttttttttttttttttttttttttttttttttttttttttttttttttttttttttttttttttttttttttttttttttttttttttttttttttttttttttttttttttttttttttttttttttttttttttttttttttttttttttttttttttttttttttttttttttttttttttttttttttttttttttttttttttttttttttttttttttttttttttttttttttttttttttttttttttttttttttttttttttttttttttttttttttttttttttttttttttttttttttttttttttttttttttttttttttttttttttttttttttttttttttttttttttttttttttttttttttttttttttttttttttttttttttttttttttttttttttttttttttttttttttttttttttttttttttttttttttttttttttttttttttttttttttttttttttttttttttttttttttttttttttttttttttttttttttttttttttttttttttttttttttttttttttttttttttttttttttttttttttttttttttttttttttttttttttttttttttttttttttttttttttttttttttttttttttttttttttttttttttttttttttttttttttttttttttttttttttttttttttttttttttttttttttttttttttttttttttttttttttttttttttttttttttttttttttttttttttttttttttttttttttttttttttttttttttttttttttttttttttttttttttttttttttttttttttttttttttttttttttttttttttttttttttttttttttttttttttttttttttttttttttttttttttttttttttttttttttttttttttttttttttttttttttttttttttttttttttttttttttttttttttttttttttttttttttttttttttttttttttttttttttttttttttttttttttttttttttttttttttttttttttttttttttttttttttttttttttttttttttttttttttttttttttttttttttttttttttttttttttttttttttttttttttttttttttttttttttttttttttttttttttttttttttttttttttttttttttttttttttttttttttttttttttttttttttttttttttttttttttttttttttttttttttttttttttttttttttttttttttttttttttttttttttttttttttttttttttttttttttttttttttttttttttttttttttttttttttttttttttttttttttttttttttttttttttttttttttttttttttttttttttttttttttttttttttttttttttttttttttttttttttttttttttttttttttttttttttttttttttttttttttttttttttttttttttttttttttttttttttttttttttttttttttttttttttttttttttttttttttttttttttttttttttttttttttttttttttttttttttttttttttttttttttttttttttttttttttttttttttttttttttttttttttttttttttttttttttttttttttttttttttttttttttttttttttttttttttttttttttttttttttttttttttttttttttttttttttttttttttttttttttttttttttttttttttttttttttttttttttttttttttttttttttttttttttttttttttttttttttttttttttttttttttttttttttttttttttttttttttttttttttttttttttttttttttttttttttttttttttttttttttttttttttttttttttttttttttttttttttttttttttttttttttttttttttttttttttttttttttttttttttttttttttttttttttttttttttttttttttttttttttttttttttttttttttttttttttttttttttttttttttttttttttttttttttttttttttttttttttttttttttttttttttttttttttttttttttttttttttttttttttttttttttttttttttttttttttttttttttttttttttttttttttttttttttttttttttttttttttttttttttttttttttttttttttttttttttttttttttttttttttttttttttttttttttttttttttttttttttttttttttttttttttttttttttttttttttttttttttttttttttttttttttttttttttttttttttttttttttttttttttttttttttttttttttttttttttttttttttttttttttttttttttttttttttttttttttttttttttttttttttttttttttttttttttttttttttttttttttttttttttttttttttttttttttttttttttttttttttttttttttttttttttttttttttttttttttttttttttttttt

SEQ ID NO: 37 - DNA, 5000 bp, Artificial Sequence; identical to SEQ ID NO: 34
  source: /note="Description of Artificial Sequence: Synthetic polynucleotide"
  misc_feature (1)..(5000): /note="This sequence may encompass 100-5000 nucleotides"
  source: /note="See specification as filed for detailed description of substitutions and preferred embodiments"

SEQ ID NO: 38 - DNA, 400 bp, Artificial Sequence
  source: /note="Description of Artificial Sequence: Synthetic polynucleotide"
  misc_feature (1)..(400): /note="This sequence may encompass 100-400 nucleotides"
  source: /note="See specification as filed for detailed description of substitutions and preferred embodiments"
aaaaaaaaaaaaaaaaaaaaaaaaaaaaaaaaaaaaaaaaaaaaaaaaaaaaaaaaaaaaaaaaaaaaaaaaaaaaaaaaaaaaaaaaaaaaaaaaaaaaaaaaaaaaaaaaaaaaaaaaaaaaaaaaaaaaaaaaaaaaaaaaaaaaaaaaaaaaaaaaaaaaaaaaaaaaaaaaaaaaaaaaaaaaaaaaaaaaaaaaaaaaaaaaaaaaaaaaaaaaaaaaaaaaaaaaaaaaaaaaaaaaaaaaaaaaaaaaaaaaaaaaaaaaaaaaaaaaaaaaaaaaaaaaaaaaaaaaaaaaaaaaaaaaaaaaaaaaaaaaaaaaaaaaaaaaaaaaaaaaaaaaaaaaaaaaaaaaaaaaaaaaaaaaaaaaaaaaaaaaaaaaaaaaaaaaaaaaaaaa

SEQ ID NO: 39 - protein, 373 aa, Artificial Sequence
  source: /note="Description of Artificial Sequence: Synthetic polypeptide"
PGWFLDSPDRPWNPPTFSPALLVVTEGDNATFTCSFSNTSESFVLNWYRMSPSNQTDKLAAFPEDRSQPGQDCRFRVTQLPNGRDFHMSVVRARRNDSGTYLCGAISLAPKAQIKESLRAELRVTERRAEVPTAHPSPSPRPAGQFQTLVTTTPAPRPPTPAPTIASQPLSLRPEACRPAAGGAVHTRGLDFACDIYIWAPLAGTCGVLLLSLVITLYCKRGRKKLLYIFKQPFMRPVQTTQEEDGCSCRFPEEEEGGCELRVKFSRSADAPAYKQGQNQLYNELNLGRREEYDVLDKRRGRDPEMGGKPRRKNPQEGLYNELQKDKMAEAYSEIGMKGERRRGKGHDGLYQGLSTATKDTYDALHMQALPPR

SEQ ID NO: 40-51 - skipped (12 entries)

SEQ ID NO: 52 - protein, 132 aa, Artificial Sequence
  source: /note="Description of Artificial Sequence: Synthetic polypeptide"
DVPDYASLGGPSSPKKKRKVSRGVQVETISPGDGRTFPKRGQTCVVHYTGMLEDGKKFDSSRDRNKPFKFMLGKQEVIRGWEEGVAQMSVGQRAKLTISPDYAYGATGHPGIIPPHATLVFDVELLKLETSY

SEQ ID NO: 53 - protein, 108 aa, Artificial Sequence
  source: /note="Description of Artificial Sequence: Synthetic polypeptide"
VQVETISPGDGRTFPKRGQTCVVHYTGMLEDGKKFDSSRDRNKPFKFMLGKQEVIRGWEEGVAQMSVGQRAKLTISPDYAYGATGHPGIIPPHATLVFDVELLKLETS

SEQ ID NO: 54 - protein, 93 aa, Artificial Sequence [sequence omitted]

SEQ ID NO: 55 - protein, 95 aa, Artificial Sequence
  source: /note="Description of Artificial Sequence: Synthetic polypeptide"
ILWHEMWHEGLIEASRLYFGERNVKGMFEVLEPLHAMMERGPQTLKETSFNQAYGRDLMEAQEWCRKYMKSGNVKDLTQAWDLYYHVFRRISKTS

SEQ ID NO: 56 - protein, 95 aa, Artificial Sequence
  source: /note="Description of Artificial Sequence: Synthetic polypeptide"
ILWHEMWHEGLLEASRLYFGERNVKGMFEVLEPLHAMMERGPQTLKETSFNQAYGRDLMEAQEWCRKYMKSGNVKDLTQAWDLYYHVFRRISKTS

SEQ ID NO: 57 - protein, 95 aa, Artificial Sequence
  source: /note="Description of Artificial Sequence: Synthetic polypeptide"
ILWHEMWHEGLEEASRLYFGERNVKGMFEVLEPLHAMMERGPQTLKETSFNQAYGRDLMEAQEWCRKYMKSGNVKDLLQAWDLYYHVFRRISKTS

SEQ ID NO: 58 - protein, 95 aa, Artificial Sequence
  source: /note="Description of Artificial Sequence: Synthetic polypeptide"
  MOD_RES (12)..(12): Any amino acid
  MOD_RES (78)..(78): Any amino acid
ILWHEMWHEGLXEASRLYFGERNVKGMFEVLEPLHAMMERGPQTLKETSFNQAYGRDLMEAQEWCRKYMKSGNVKDLXQAWDLYYHVFRRISKTS

SEQ ID NO: 59 - protein, 95 aa, Artificial Sequence
  source: /note="Description of Artificial Sequence: Synthetic polypeptide"
ILWHEMWHEGLIEASRLYFGERNVKGMFEVLEPLHAMMERGPQTLKETSFNQAYGRDLMEAQEWCRKYMKSGNVKDLLQAWDLYYHVFRRISKTS

SEQ ID NO: 60 - protein, 95 aa, Artificial Sequence
  source: /note="Description of Artificial Sequence: Synthetic polypeptide"
ILWHEMWHEGLLEASRLYFGERNVKGMFEVLEPLHAMMERGPQTLKETSFNQAYGRDLMEAQEWCRKYMKSGNVKDLLQAWDLYYHVFRRISKTS

SEQ ID NO: 61 - protein, 1132 aa, Homo sapiens [sequence omitted]

SEQ ID NO: 62 - DNA, 4027 bp, Homo sapiens
caggcagcgtggtcctgctgcgcacgtgggaagccctggccccggccacccccgcgatgccgcgcgctccccgctgccgagccgtgcgctccctgctgcgcagccactaccgcgaggtgctgccgctggccacgttcgtgcggcgcctggggccccagggctggcggctggtgcagcgcggggacccggcggctttccgcgcgctggtggcccagtgcctggtgtgcgtgccctgggacgcacggccgccccccgccgccccctccttccgccaggtgtcctgcctgaaggagctggtggcccgagtgctgcagaggctgtgcgagcgcggcgcgaagaacgtgctggccttcggcttcgcgctgctggacggggcccgcgggggcccccccgaggccttcaccaccagcgtgcgcagctacctgcccaacacggtgaccgacgcactgcgggggagcggggcgtgggggctgctgttgcgccgcgtgggcgacgacgtgctggttcacctgctggcacgctgcgcgctctttgtgctggtggctcccagctgcgcctaccaggtgtgcgggccgccgctgtaccagctcggcgctgccactcaggcccggcccccgccacacgctagtggaccccgaaggcgtctgggatgcgaacgggcctggaaccatagcgtcagggaggccggggtccccctgggcctgccagccccgggtgcgaggaggcgcgggggcagtgccagccgaagtctgccgttgcccaagaggcccaggcgtggcgctgcccctgagccggagcggacgcccgttgggcaggggtcctgggcccacccgggcaggacgcgtggaccgagtgaccgtggtttctgtgtggtgtcacctgccagacccgccgaagaagccacctctttggagggtgcgctctctggcacgcgccactcccacccatccgtgggccgccagcaccacgcgggccccccatccacatcgcggccaccacgtccctgggacacgccttgtcccccggtgtacgccgagaccaagcacttcctctactcctcaggcgacaaggagcagctgcggccctccttcctactcagctctctgaggcccagcctgactggcgctcggaggctcgtggagaccatctttctgggttccaggccctggatgccagggactccccgcaggttgccccgcctgccccagcgctactggcaaatgcggcccctgtttctggagctgcttgggaaccacgcgcagtgcccctacggggtgctcctcaagacgcactgcccgctgcgagctgcggtcaccccagcagccggtgtctgtgcccgggagaagccccagggctctgtggcggcccccgaggaggaggacacagacccccgtcgcctggtgcagctgctccgccagcacagcagcccctggcaggtgtacggcttcgtgcgggcctgcctgcgccggctggtgcccccaggcctctggggctccaggcacaacgaacgccgcttcctcaggaacaccaagaagttcatctccctggggaagcatgccaagctctcgctgcaggagctgacgtggaagatgagcgtgcggggctgcgcttggctgcgcaggagcccaggggttggctgtgttccggccgcagagcaccgtctgcgtgaggagatcctggccaagttcctgcactggctgatgagtgtgtacgtcgtcgagctgctcaggtctttcttttatgtcacggagaccacgtttcaaaagaacaggctctttttctaccggaagagtgtctggagcaagttgcaaagcattggaatcagacagcacttgaagagggtgcagctgcgggagctgtcggaagcagaggtcaggcagcatcgggaagccaggcccgccctgctgacgtccagactccgcttcatccccaagcctgacgggctgcggccgattgtgaacatggactacgtcgtgggagccagaacgttccgcagagaaaagagggccgagcgtctcacctcgagggtgaaggcactgttcagcgtgctcaactacgagcgggcgcggcgccccggcctcctgggcgcctctgtgctgggcctggacgatatccacagggcctggcgcaccttcgtgctgcgtgtgcgggcccaggacccgccgcctgagctgtactttgtcaaggtggatgtgacgggcgcgtacgacaccatcccccaggacaggctcacggaggtcatcgccagcatcatcaaaccccagaacacgtactgcgtgcgtcggtatgccgtggtccagaaggccgcccatgggcacgtccgcaaggccttcaagagccacgtctctaccttgacagacctccagccgtacatgcgacagttcgtggctcacctgcaggagaccagcccgctgagggatgccgtcgtcatcgagcagagctcctccctgaatgaggccagcagtggcctcttcgacgtcttcctacgcttcatgtgccaccacgccgtgcgcatcaggggcaagtcctacgtccagtgccaggggatcccgcagggctccatcctctccacgctgctctgcagcctgtgctacggcgacatggagaacaagctgtttgcggggattcggcgggacgggctgctcctgcgtttggtggatgatttcttgttggtgacacctcacctcacccacgcgaaaaccttcctcaggaccctggtccgaggtgtccctgagtatggctgcgtggtgaacttgcggaagacagtggtgaacttccctgtagaagacgaggccctgggtggcacggcttttgttcagatgccggcccacggcctattcccctggtgcggcctgctgctggatacccggaccctggaggtgcagagcgactactccagctatgcccggacctccatcagagccagtctcaccttcaaccgcggcttcaaggctgggaggaacatgcgtcgcaaactctttggggtcttgcggctgaagtgtcacagcctgtttctggatttgcaggtgaacagcctccagacggtgtgcaccaacatctacaagatcctcctgctgcaggcgtacaggtttcacgcatgtgtgctgcagctcccatttcatcagcaagtttggaagaaccccacatttttcctgcgcgtcatctctgacacggcctccctctgctactccatcctgaaagccaagaacgcagggatgtcgctgggggccaagggcgccgccggccctctgccctccgaggccgtgcagtggctgtgccaccaagcattcctgctcaagctgactcgacaccgtgtcacctacgtgccactcctggggtcactcaggacagcccagacgcagctgagtcggaagctcccggggacgacgctgactgccctggaggccgcagccaacccggcactgccctcagacttcaagaccatcctggactgatggccacccgcccacagccaggccgagagcagacaccagcagccctgtcacgccgggctctacgtcccagggagggaggggcggcccacacccaggcccgcaccgctgggagtctgaggcctgagtgagtgtttggccgaggcctgcatgtccggctgaaggctgagtgtccggctgaggcctgagcgagtgtccagccaagggctgagtgtccagcacacctgccgtcttcacttccccacaggctggcgctcggctccaccccagggccagcttttcctcaccaggagcccggcttccactccccacataggaatagtccatccccagattcgccattgttcacccctcgccctgccctcctttgccttccacccccaccatccaggtggagaccctgagaaggaccctgggagctctgggaatttggagtgaccaaaggtgtgccctgtacacaggcgaggaccctgcacctggatgggggtccctgtgggtcaaattggggggaggtgctgtgggagtaaaatactgaatatatgagtttttcagttttgaaaaaaaaaaaaaaaaaa

SEQ ID NO: 63-77 - skipped (15 entries)

SEQ ID NO: 78 - protein, 30 aa, Artificial Sequence
  source: /note="Description of Artificial Sequence: Synthetic polypeptide"
  SITE (1)..(30): /note="This sequence may encompass 1-6 'Gly Gly Gly Gly Ser' repeating units"
  source: /note="See specification as filed for detailed description of substitutions and preferred embodiments"
GGGGSGGGGSGGGGSGGGGSGGGGSGGGGS

SEQ ID NO: 79-111 - skipped (33 entries)

SEQ ID NO: 112 - protein, 4 aa, Artificial Sequence
  source: /note="Description of Artificial Sequence: Synthetic peptide"
RGDS

SEQ ID NO: 113-399 - skipped (287 entries)

SEQ ID NO: 400 - DNA, 1184 bp, Artificial Sequence
  source: /note="Description of Artificial Sequence: Synthetic polynucleotide"
cgtgaggctccggtgcccgtcagtgggcagagcgcacatcgcccacagtccccgagaagttggggggaggggtcggcaattgaaccggtgcctagagaaggtggcgcggggtaaactgggaaagtgatgtcgtgtactggctccgcctttttcccgagggtgggggagaaccgtatataagtgcagtagtcgccgtgaacgttctttttcgcaacgggtttgccgccagaacacaggtaagtgccgtgtgtggttcccgcgggcctggcctctttacgggttatggcccttgcgtgccttgaattacttccacctggctgcagtacgtgattcttgatcccgagcttcgggttggaagtgggtgggagagttcgaggccttgcgcttaaggagccccttcgcctcgtgcttgagttgaggcctggcctgggcgctggggccgccgcgtgcgaatctggtggcaccttcgcgcctgtctcgctgctttcgataagtctctagccatttaaaatttttgatgacctgctgcgacgctttttttctggcaagatagtcttgtaaatgcgggccaagatctgcacactggtatttcggtttttggggccgcgggcggcgacggggcccgtgcgtcccagcgcacatgttcggcgaggcggggcctgcgagcgcggccaccgagaatcggacgggggtagtctcaagctggccggcctgctctggtgcctggcctcgcgccgccgtgtatcgccccgccctgggcggcaaggctggcccggtcggcaccagttgcgtgagcggaaagatggccgcttcccggccctgctgcagggagctcaaaatggaggacgcggcgctcgggagagcgggcgggtgagtcacccacacaaaggaaaagggcctttccgtcctcagccgtcgcttcatgtgactccacggagtaccgggcgccgtccaggcacctcgattagttctcgagcttttggagtacgtcgtctttaggttggggggaggggttttatgcgatggagtttccccacactgagtgggtggagactgaagttaggccagcttggcacttgatgtaattctccttggaatttgccctttttgagtttggatcttggttcattctcaagcctcagacagtggttcaaagtttttttcttccatttcaggtgtcgtga

SEQ ID NO: 401 - protein, 21 aa, Artificial Sequence
  source: /note="Description of Artificial Sequence: Synthetic peptide"
MALPVTALLLPLALLLHAARP

SEQ ID NO: 402 - DNA, 63 bp, Artificial Sequence
  source: /note="Description of Artificial Sequence: Synthetic oligonucleotide"
atggccctgcctgtgacagccctgctgctgcctctggctctgctgctgcatgccgctagaccc

SEQ ID NO: 403 - protein, 45 aa, Artificial Sequence
  source: /note="Description of Artificial Sequence: Synthetic polypeptide"
TTTPAPRPPTPAPTIASQPLSLRPEACRPAAGGAVHTRGLDFACD

SEQ ID NO: 404 - DNA, 135 bp, Artificial Sequence
  source: /note="Description of Artificial Sequence: Synthetic polynucleotide"
accacgacgccagcgccgcgaccaccaacaccggcgcccaccatcgcgtcgcagcccctgtccctgcgcccagaggcgtgccggccagcggcggggggcgcagtgcacacgagggggctggacttcgcctgtgat

SEQ ID NO: 405 - protein, 230 aa, Artificial Sequence
  source: /note="Description of Artificial Sequence: Synthetic polypeptide"
ESKYGPPCPPCPAPEFLGGPSVFLFPPKPKDTLMISRTPEVTCVVVDVSQEDPEVQFNWYVDGVEVHNAKTKPREEQFNSTYRVVSVLTVLHQDWLNGKEYKCKVSNKGLPSSIEKTISKAKGQPREPQVYTLPPSQEEMTKNQVSLTCLVKGFYPSDIAVEWESNGQPENNYKTTPPVLDSDGSFFLYSRLTVDKSRWQEGNVFSCSVMHEALHNHYTQKSLSLSLGKM

SEQ ID NO: 406 - DNA, 690 bp, Artificial Sequence
  source: /note="Description of Artificial Sequence: Synthetic polynucleotide"
gagagcaagtacggccctccctgccccccttgccctgcccccgagttcctgggcggacccagcgtgttcctgttcccccccaagcccaaggacaccctgatgatcagccggacccccgaggtgacctgtgtggtggtggacgtgtcccaggaggaccccgaggtccagttcaactggtacgtggacggcgtggaggtgcacaacgccaagaccaagccccgggaggagcagttcaatagcacctaccgggtggtgtccgtgctgaccgtgctgcaccaggactggctgaacggcaaggaatacaagtgtaaggtgtccaacaagggcctgcccagcagcatcgagaaaaccatcagcaaggccaagggccagcctcgggagccccaggtgtacaccctgccccctagccaagaggagatgaccaagaaccaggtgtccctgacctgcctggtgaagggcttctaccccagcgacatcgccgtggagtgggagagcaacggccagcccgagaacaactacaagaccaccccccctgtgctggacagcgacggcagcttcttcctgtacagccggctgaccgtggacaagagccggtggcaggagggcaacgtctttagctgctccgtgatgcacgaggccctgcacaaccactacacccagaagagcctgagcctgtccctgggcaagatg

SEQ ID NO: 407 - protein, 282 aa, Artificial Sequence
  source: /note="Description of Artificial Sequence: Synthetic polypeptide"
RWPESPKAQASSVPTAQPQAEGSLAKATTAPATTRNTGRGGEEKKKEKEKEEQEERETKTPECPSHTQPLGVYLLTPAVQDLWLRDKATFTCFVVGSDLKDAHLTWEVAGKVPTGGVEEGLLERHSNGSQSQHSRLTLPRSLWNAGTSVTCTLNHPSLPPQRLMALREPAAQAPVKLSLNLLASSDPPEAASWLLCEVSGFSPPNILLMWLEDQREVNTSGFAPARPPPQPGSTTFWAWSVLRVPAPPSPQPATYTCVVSHEDSRTLLNASRSLEVSYVTDH

SEQ ID NO: 408 - DNA, 847 bp, Artificial Sequence
  source: /note="Description of Artificial Sequence: Synthetic polynucleotide"
aggtggcccgaaagtcccaaggcccaggcatctagtgttcctactgcacagccccaggcagaaggcagcctagccaaagctactactgcacctgccactacgcgcaatactggccgtggcggggaggagaagaaaaaggagaaagagaaagaagaacaggaagagagggagaccaagacccctgaatgtccatcccatacccagccgctgggcgtctatctcttgactcccgcagtacaggacttgtggcttagagataaggccacctttacatgtttcgtcgtgggctctgacctgaaggatgcccatttgacttgggaggttgccggaaaggtacccacagggggggttgaggaagggttgctggagcgccattccaatggctctcagagccagcactcaagactcacccttccgagatccctgtggaacgccgggacctctgtcacatgtactctaaatcatcctagcctgcccccacagcgtctgatggcccttagagagccagccgcccaggcaccagttaagcttagcctgaatctgctcgccagtagtgatcccccagaggccgccagctggctcttatgcgaagtgtccggctttagcccgcccaacatcttgctcatgtggctggaggaccagcgagaagtgaacaccagcggcttcgctccagcccggcccccaccccagccgggttctaccacattctgggcctggagtgtcttaagggtcccagcaccacctagcccccagccagccacatacacctgtgttgtgtcccatgaagatagcaggaccctgctaaatgcttctaggagtctggaggtttcctacgtgactgaccatt

SEQ ID NO: 409-890 - skipped (482 entries)

SEQ ID NO: 891 - protein, 486 aa, Artificial Sequence
  source: /note="Description of Artificial Sequence: Synthetic polypeptide"
MALPVTALLLPLALLLHAARPDIQMTQTTSSLSASLGDRVTISCRASQDISKYLNWYQQKPDGTVKLLIYHTSRLHSGVPSRFSGSGSGTDYSLTISNLEQEDIATYFCQQGNTLPYTFGGGTKLEITGGGGSGGGGSGGGGSEVKLQESGPGLVAPSQSLSVTCTVSGVSLPDYGVSWIRQPPRKGLEWLGVIWGSETTYYNSALKSRLTIIKDNSKSQVFLKMNSLQTDDTAIYYCAKHYYYGGSYAMDYWGQGTSVTVSSTTTPAPRPPTPAPTIASQPLSLRPEACRPAAGGAVHTRGLDFACDIYIWAPLAGTCGVLLLSLVITLYCKRGRKKLLYIFKQPFMRPVQTTQEEDGCSCRFPEEEEGGCELRVKFSRSADAPAYKQGQNQLYNELNLGRREEYDVLDKRRGRDPEMGGKPRRKNPQEGLYNELQKDKMAEAYSEIGMKGERRRGKGHDGLYQGLSTATKDTYDALHMQALPPR

SEQ ID NO: 892 - protein, 465 aa, Artificial Sequence
  source: /note="Description of Artificial Sequence: Synthetic polypeptide"
DIQMTQTTSSLSASLGDRVTISCRASQDISKYLNWYQQKPDGTVKLLIYHTSRLHSGVPSRFSGSGSGTDYSLTISNLEQEDIATYFCQQGNTLPYTFGGGTKLEITGGGGSGGGGSGGGGSEVKLQESGPGLVAPSQSLSVTCTVSGVSLPDYGVSWIRQPPRKGLEWLGVIWGSETTYYNSALKSRLTIIKDNSKSQVFLKMNSLQTDDTAIYYCAKHYYYGGSYAMDYWGQGTSVTVSSTTTPAPRPPTPAPTIASQPLSLRPEACRPAAGGAVHTRGLDFACDIYIWAPLAGTCGVLLLSLVITLYCKRGRKKLLYIFKQPFMRPVQTTQEEDGCSCRFPEEEEGGCELRVKFSRSADAPAYKQGQNQLYNELNLGRREEYDVLDKRRGRDPEMGGKPRRKNPQEGLYNELQKDKMAEAYSEIGMKGERRRGKGHDGLYQGLSTATKDTYDALHMQALPPR

SEQ ID NO: 893 - protein, 242 aa, Artificial Sequence
  source: /note="Description of Artificial Sequence: Synthetic polypeptide"
EIVMTQSPATLSLSPGERATLSCRASQDISKYLNWYQQKPGQAPRLLIYHTSRLHSGIPARFSGSGSGTDYTLTISSLQPEDFAVYFCQQGNTLPYTFGQGTKLEIKGGGGSGGGGSGGGGSQVQLQESGPGLVKPSETLSLTCTVSGVSLPDYGVSWIRQPPGKGLEWIGVIWGSETTYYSSSLKSRVTISKDNSKNQVSLKLSSVTAADTAVYYCAKHYYYGGSYAMDYWGQGTLVTVSS

SEQ ID NO: 894 - DNA, 813 bp, Artificial Sequence
  source: /note="Description of Artificial Sequence: Synthetic polynucleotide"
atggccctccctgtcaccgccctgctgcttccgctggctcttctgctccacgccgctcggcccgaaattgtgatgacccagtcacccgccactcttagcctttcacccggtgagcgcgcaaccctgtcttgcagagcctcccaagacatctcaaaataccttaattggtatcaacagaagcccggacaggctcctcgccttctgatctaccacaccagccggctccattctggaatccctgccaggttcagcggtagcggatctgggaccgactacaccctcactatcagctcactgcagccagaggacttcgctgtctatttctgtcagcaagggaacaccctgccctacacctttggacagggcaccaagctcgagattaaaggtggaggtggcagcggaggaggtgggtccggcggtggaggaagccaggtccaactccaagaaagcggaccgggtcttgtgaagccatcagaaactctttcactgacttgtactgtgagcggagtgtctctccccgattacggggtgtcttggatcagacagccaccggggaagggtctggaatggattggagtgatttggggctctgagactacttactactcttcatccctcaagtcacgcgtcaccatctcaaaggacaactctaagaatcaggtgtcactgaaactgtcatctgtgaccgcagccgacaccgccgtgtactattgcgctaagcattactattatggcgggagctacgcaatggattactggggacagggtactctggtcaccgtgtccagccaccaccatcatcaccatcaccat

SEQ ID NO: 895 - protein, 271 aa, Artificial Sequence
  source: /note="Description of Artificial Sequence: Synthetic polypeptide"
MALPVTALLLPLALLLHAARPEIVMTQSPATLSLSPGERATLSCRASQDISKYLNWYQQKPGQAPRLLIYHTSRLHSGIPARFSGSGSGTDYTLTISSLQPEDFAVYFCQQGNTLPYTFGQGTKLEIKGGGGSGGGGSGGGGSQVQLQESGPGLVKPSETLSLTCTVSGVSLPDYGVSWIRQPPGKGLEWIGVIWGSETTYYSSSLKSRVTISKDNSKNQVSLKLSSVTAADTAVYYCAKHYYYGGSYAMDYWGQGTLVTVSSHHHHHHHH

SEQ ID NO: 896 - DNA, 1458 bp, Artificial Sequence
  source: /note="Description of Artificial Sequence: Synthetic polynucleotide"
atggccctccctgtcaccgccctgctgcttccgctggctcttctgctccacgccgctcggcccgaaattgtgatgacccagtcacccgccactcttagcctttcacccggtgagcgcgcaaccctgtcttgcagagcctcccaagacatctcaaaataccttaattggtatcaacagaagcccggacaggctcctcgccttctgatctaccacaccagccggctccattctggaatccctgccaggttcagcggtagcggatctgggaccgactacaccctcactatcagctcactgcagccagaggacttcgctgtctatttctgtcagcaagggaacaccctgccctacacctttggacagggcaccaagctcgagattaaaggtggaggtggcagcggaggaggtgggtccggcggtggaggaagccaggtccaactccaagaaagcggaccgggtcttgtgaagccatcagaaactctttcactgacttgtactgtgagcggagtgtctctccccgattacggggtgtcttggatcagacagccaccggggaagggtctggaatggattggagtgatttggggctctgagactacttactactcttcatccctcaagtcacgcgtcaccatctcaaaggacaactctaagaatcaggtgtcactgaaactgtcatctgtgaccgcagccgacaccgccgtgtactattgcgctaagcattactattatggcgggagctacgcaatggattactggggacagggtactctggtcaccgtgtccagcaccactaccccagcaccgaggccacccaccccggctcctaccatcgcctcccagcctctgtccctgcgtccggaggcatgtagacccgcagctggtggggccgtgcatacccggggtcttgacttcgcctgcgatatctacatttgggcccctctggctggtacttgcggggtcctgctgctttcactcgtgatcactctttactgtaagcgcggtcggaagaagctgctgtacatctttaagcaacccttcatgaggcctgtgcagactactcaagaggaggacggctgttcatgccggttcccagaggaggaggaaggcggctgcgaactgcgcgtgaaattcagccgcagcgcagatgctccagcctacaagcaggggcagaaccagctctacaacgaactcaatcttggtcggagagaggagtacgacgtgctggacaagcggagaggacgggacccagaaatgggcgggaagccgcgcagaaagaatccccaagagggcctgtacaacgagctccaaaaggataagatggcagaagcctatagcgagattggtatgaaaggggaacgcagaagaggcaaaggccacgacggactgtaccagggactcagcaccgccaccaaggacacctatgacgctcttcacatgcaggccctgccgcctcgg

SEQ ID NO: 897 - protein, 486 aa, Artificial Sequence
  source: /note="Description of Artificial Sequence: Synthetic polypeptide"
MALPVTALLLPLALLLHAARPEIVMTQSPATLSLSPGERATLSCRASQDISKYLNWYQQKPGQAPRLLIYHTSRLHSGIPARFSGSGSGTDYTLTISSLQPEDFAVYFCQQGNTLPYTFGQGTKLEIKGGGGSGGGGSGGGGSQVQLQESGPGLVKPSETLSLTCTVSGVSLPDYGVSWIRQPPGKGLEWIGVIWGSETTYYSSSLKSRVTISKDNSKNQVSLKLSSVTAADTAVYYCAKHYYYGGSYAMDYWGQGTLVTVSSTTTPAPRPPTPAPTIASQPLSLRPEACRPAAGGAVHTRGLDFACDIYIWAPLAGTCGVLLLSLVITLYCKRGRKKLLYIFKQPFMRPVQTTQEEDGCSCRFPEEEEGGCELRVKFSRSADAPAYKQGQNQLYNELNLGRREEYDVLDKRRGRDPEMGGKPRRKNPQEGLYNELQKDKMAEAYSEIGMKGERRRGKGHDGLYQGLSTATKDTYDALHMQALPPR

SEQ ID NO: 898 - protein, 242 aa, Artificial Sequence
  source: /note="Description of Artificial Sequence: Synthetic polypeptide"
EIVMTQSPATLSLSPGERATLSCRASQDISKYLNWYQQKPGQAPRLLIYHTSRLHSGIPARFSGSGSGTDYTLTISSLQPEDFAVYFCQQGNTLPYTFGQGTKLEIKGGGGSGGGGSGGGGSQVQLQESGPGLVKPSETLSLTCTVSGVSLPDYGVSWIRQPPGKGLEWIGVIWGSETTYYQSSLKSRVTISKDNSKNQVSLKLSSVTAADTAVYYCAKHYYYGGSYAMDYWGQGTLVTVSS

SEQ ID NO: 899 - DNA, 813 bp, Artificial Sequence
  source: /note="Description of Artificial Sequence: Synthetic polynucleotide"
atggccctccctgtcaccgccctgctgcttccgctggctcttctgctccacgccgctcggcccgaaattgtgatgacccagtcacccgccactcttagcctttcacccggtgagcgcgcaaccctgtcttgcagagcctcccaagacatctcaaaataccttaattggtatcaacagaagcccggacaggctcctcgccttctgatctaccacaccagccggctccattctggaatccctgccaggttcagcggtagcggatctgggaccgactacaccctcactatcagctcactgcagccagaggacttcgctgtctatttctgtcagcaagggaacaccctgccctacacctttggacagggcaccaagctcgagattaaaggtggaggtggcagcggaggaggtgggtccggcggtggaggaagccaggtccaactccaagaaagcggaccgggtcttgtgaagccatcagaaactctttcactgacttgtactgtgagcggagtgtctctccccgattacggggtgtcttggatcagacagccaccggggaagggtctggaatggattggagtgatttggggctctgagactacttactaccaatcatccctcaagtcacgcgtcaccatctcaaaggacaactctaagaatcaggtgtcactgaaactgtcatctgtgaccgcagccgacaccgccgtgtactattgcgctaagcattactattatggcgggagctacgcaatggattactggggacagggtactctggtcaccgtgtccagccaccaccatcatcaccatcaccat

SEQ ID NO: 900 - protein, 271 aa, Artificial Sequence
  source: /note="Description of Artificial Sequence: Synthetic polypeptide"
MALPVTALLLPLALLLHAARPEIVMTQSPATLSLSPGERATLSCRASQDISKYLNWYQQKPGQAPRLLIYHTSRLHSGIPARFSGSGSGTDYTLTISSLQPEDFAVYFCQQGNTLPYTFGQGTKLEIKGGGGSGGGGSGGGGSQVQLQESGPGLVKPSETLSLTCTVSGVSLPDYGVSWIRQPPGKGLEWIGVIWGSETTYYQSSLKSRVTISKDNSKNQVSLKLSSVTAADTAVYYCAKHYYYGGSYAMDYWGQGTLVTVSSHHHHHHHH

SEQ ID NO: 901 - DNA, 1458 bp, Artificial Sequence
  source: /note="Description of Artificial Sequence: Synthetic polynucleotide"
atggccctccctgtcaccgccctgctgcttccgctggctcttctgctccacgccgctcggcccgaaattgtgatgacccagtcacccgccactcttagcctttcacccggtgagcgcgcaaccctgtcttgcagagcctcccaagacatctcaaaataccttaattggtatcaacagaagcccggacaggctcctcgccttctgatctaccacaccagccggctccattctggaatccctgccaggttcagcggtagcggatctgggaccgactacaccctcactatcagctcactgcagccagaggacttcgctgtctatttctgtcagcaagggaacaccctgccctacacctttggacagggcaccaagctcgagattaaaggtggaggtggcagcggaggaggtgggtccggcggtggaggaagccaggtccaactccaagaaagcggaccgggtcttgtgaagccatcagaaactctttcactgacttgtactgtgagcggagtgtctctccccgattacggggtgtcttggatcagacagccaccggggaagggtctggaatggattggagtgatttggggctctgagactacttactaccaatcatccctcaagtcacgcgtcaccatctcaaaggacaactctaagaatcaggtgtcactgaaactgtcatctgtgaccgcagccgacaccgccgtgtactattgcgctaagcattactattatggcgggagctacgcaatggattactggggacagggtactctggtcaccgtgtccagcaccactaccccagcaccgaggccacccaccccggctcctaccatcgcctcccagcctctgtccctgcgtccggaggcatgtagacccgcagctggtggggccgtgcatacccggggtcttgacttcgcctgcgatatctacatttgggcccctctggctggtacttgcggggtcctgctgctttcactcgtgatcactctttactgtaagcgcggtcggaagaagctgctgtacatctttaagcaacccttcatgaggcctgtgcagactactcaagaggaggacggctgttcatgccggttcccagaggaggaggaaggcggctgcgaactgcgcgtgaaattcagccgcagcgcagatgctccagcctacaagcaggggcagaaccagctctacaacgaactcaatcttggtcggagagaggagtacgacgtgctggacaagcggagaggacgggacccagaaatgggcgggaagccgcgcagaaagaatccccaagagggcctgtacaacgagctccaaaaggataagatggcagaagcctatagcgagattggtatgaaaggggaacgcagaagaggcaaaggccacgacggactgtaccagggactcagcaccgccaccaaggacacctatgacgctcttcacatgcaggccctgccgcctcgg

SEQ ID NO: 902 - protein, 486 aa, Artificial Sequence
  source: /note="Description of Artificial Sequence: Synthetic polypeptide"
MALPVTALLLPLALLLHAARPEIVMTQSPATLSLSPGERATLSCRASQDISKYLNWYQQKPGQAPRLLIYHTSRLHSGIPARFSGSGSGTDYTLTISSLQPEDFAVYFCQQGNTLPYTFGQGTKLEIKGGGGSGGGGSGGGGSQVQLQESGPGLVKPSETLSLTCTVSGVSLPDYGVSWIRQPPGKGLEWIGVIWGSETTYYQSSLKSRVTISKDNSKNQVSLKLSSVTAADTAVYYCAKHYYYGGSYAMDYWGQGTLVTVSSTTTPAPRPPTPAPTIASQPLSLRPEACRPAAGGAVHTRGLDFACDIYIWAPLAGTCGVLLLSLVITLYCKRGRKKLLYIFKQPFMRPVQTTQEEDGCSCRFPEEEEGGCELRVKFSRSADAPAYKQGQNQLYNELNLGRREEYDVLDKRRGRDPEMGGKPRRKNPQEGLYNELQKDKMAEAYSEIGMKGERRRGKGHDGLYQGLSTATKDTYDALHMQALPPR

SEQ ID NO: 903 - protein, 242 aa, Artificial Sequence
  source: /note="Description of Artificial Sequence: Synthetic polypeptide"
QVQLQESGPGLVKPSETLSLTCTVSGVSLPDYGVSWIRQPPGKGLEWIGVIWGSETTYYSSSLKSRVTISKDNSKNQVSLKLSSVTAADTAVYYCAKHYYYGGSYAMDYWGQGTLVTVSSGGGGSGGGGSGGGGSEIVMTQSPATLSLSPGERATLSCRASQDISKYLNWYQQKPGQAPRLLIYHTSRLHSGIPARFSGSGSGTDYTLTISSLQPEDFAVYFCQQGNTLPYTFGQGTKLEIK

SEQ ID NO: 904 - DNA, 813 bp, Artificial Sequence
  source: /note="Description of Artificial Sequence: Synthetic polynucleotide"
atggctctgcccgtgaccgcactcctcctgccactggctctgctgcttcacgccgctcgcccacaagtccagcttcaagaatcagggcctggtctggtgaagccatctgagactctgtccctcacttgcaccgtgagcggagtgtccctcccagactacggagtgagctggattagacagcctcccggaaagggactggagtggatcggagtgatttggggtagcgaaaccacttactattcatcttccctgaagtcacgggtcaccatttcaaaggataactcaaagaatcaagtgagcctcaagctctcatcagtcaccgccgctgacaccgccgtgtattactgtgccaagcattactactatggagggtcctacgccatggactactggggccagggaactctggtcactgtgtcatctggtggaggaggtagcggaggaggcgggagcggtggaggtggctccgaaatcgtgatgacccagagccctgcaaccctgtccctttctcccggggaacgggctaccctttcttgtcgggcatcacaagatatctcaaaatacctcaattggtatcaacagaagccgggacaggcccctaggcttcttatctaccacacctctcgcctgcatagcgggattcccgcacgctttagcgggtctggaagcgggaccgactacactctgaccatctcatctctccagcccgaggacttcgccgtctacttctgccagcagggtaacaccctgccgtacaccttcggccagggcaccaagcttgagatcaaacatcaccaccatcatcaccatcac

SEQ ID NO: 905 - protein, 271 aa, Artificial Sequence
  source: /note="Description of Artificial Sequence: Synthetic polypeptide"
MALPVTALLLPLALLLHAARPQVQLQESGPGLVKPSETLSLTCTVSGVSLPDYGVSWIRQPPGKGLEWIGVIWGSETTYYSSSLKSRVTISKDNSKNQVSLKLSSVTAADTAVYYCAKHYYYGGSYAMDYWGQGTLVTVSSGGGGSGGGGSGGGGSEIVMTQSPATLSLSPGERATLSCRASQDISKYLNWYQQKPGQAPRLLIYHTSRLHSGIPARFSGSGSGTDYTLTISSLQPEDFAVYFCQQGNTLPYTFGQGTKLEIKHHHHHHHH

SEQ ID NO: 906 - DNA, 1458 bp, Artificial Sequence
  source: /note="Description of Artificial Sequence: Synthetic polynucleotide"
atggctctgcccgtgaccgcactcctcctgccactggctctgctgcttcacgccgctcgcccacaagtccagcttcaagaatcagggcctggtctggtgaagccatctgagactctgtccctcacttgcaccgtgagcggagtgtccctcccagactacggagtgagctggattagacagcctcccggaaagggactggagtggatcggagtgatttggggtagcgaaaccacttactattcatcttccctgaagtcacgggtcaccatttcaaaggataactcaaagaatcaagtgagcctcaagctctcatcagtcaccgccgctgacaccgccgtgtattactgtgccaagcattactactatggagggtcctacgccatggactactggggccagggaactctggtcactgtgtcatctggtggaggaggtagcggaggaggcgggagcggtggaggtggctccgaaatcgtgatgacccagagccctgcaaccctgtccctttctcccggggaacgggctaccctttcttgtcgggcatcacaagatatctcaaaatacctcaattggtatcaacagaagccgggacaggcccctaggcttcttatctaccacacctctcgcctgcatagcgggattcccgcacgctttagcgggtctggaagcgggaccgactacactctgaccatctcatctctccagcccgaggacttcgccgtctacttctgccagcagggtaacaccctgccgtacaccttcggccagggcaccaagcttgagatcaaaaccactactcccgctccaaggccacccacccctgccccgaccatcgcctctcagccgctttccctgcgtccggaggcatgtagacccgcagctggtggggccgtgcatacccggggtcttgacttcgcctgcgatatctacatttgggcccctctggctggtacttgcggggtcctgctgctttcactcgtgatcactctttactgtaagcgcggtcggaagaagctgctgtacatctttaagcaacccttcatgaggcctgtgcagactactcaagaggaggacggctgttcatgccggttcccagaggaggaggaaggcggctgcgaactgcgcgtgaaattcagccgcagcgcagatgctccagcctacaagcaggggcagaaccagctctacaacgaactcaatcttggtcggagagaggagtacgacgtgctggacaagcggagaggacgggacccagaaatgggcgggaagccgcgcagaaagaatccccaagagggcctgtacaacgagctccaaaaggataagatggcagaagcctatagcgagattggtatgaaaggggaacgcagaagaggcaaaggccacgacggactgtaccagggactcagcaccgccaccaaggacacctatgacgctcttcacatgcaggccctgccgcctcgg

SEQ ID NO: 907 - protein, 486 aa, Artificial Sequence
  source: /note="Description of Artificial Sequence: Synthetic polypeptide"
MALPVTALLLPLALLLHAARPQVQLQESGPGLVKPSETLSLTCTVSGVSLPDYGVSWIRQPPGKGLEWIGVIWGSETTYYSSSLKSRVTISKDNSKNQVSLKLSSVTAADTAVYYCAKHYYYGGSYAMDYWGQGTLVTVSSGGGGSGGGGSGGGGSEIVMTQSPATLSLSPGERATLSCRASQDISKYLNWYQQKPGQAPRLLIYHTSRLHSGIPARFSGSGSGTDYTLTISSLQPEDFAVYFCQQGNTLPYTFGQGTKLEIKTTTPAPRPPTPAPTIASQPLSLRPEACRPAAGGAVHTRGLDFACDIYIWAPLAGTCGVLLLSLVITLYCKRGRKKLLYIFKQPFMRPVQTTQEEDGCSCRFPEEEEGGCELRVKFSRSADAPAYKQGQNQLYNELNLGRREEYDVLDKRRGRDPEMGGKPRRKNPQEGLYNELQKDKMAEAYSEIGMKGERRRGKGHDGLYQGLSTATKDTYDALHMQALPPR

SEQ ID NO: 908 - protein, 242 aa, Artificial Sequence
  source: /note="Description of Artificial Sequence: Synthetic polypeptide"
QVQLQESGPGLVKPSETLSLTCTVSGVSLPDYGVSWIRQPPGKGLEWIGVIWGSETTYYQSSLKSRVTISKDNSKNQVSLKLSSVTAADTAVYYCAKHYYYGGSYAMDYWGQGTLVTVSSGGGGSGGGGSGGGGSEIVMTQSPATLSLSPGERATLSCRASQDISKYLNWYQQKPGQAPRLLIYHTSRLHSGIPARFSGSGSGTDYTLTISSLQPEDFAVYFCQQGNTLPYTFGQGTKLEIK

SEQ ID NO: 909 - DNA, 813 bp, Artificial Sequence
  source: /note="Description of Artificial Sequence: Synthetic polynucleotide"
atggctctgcccgtgaccgcactcctcctgccactggctctgctgcttcacgccgctcgcccacaagtccagcttcaagaatcagggcctggtctggtgaagccatctgagactctgtccctcacttgcaccgtgagcggagtgtccctcccagactacggagtgagctggattagacagcctcccggaaagggactggagtggatcggagtgatttggggtagcgaaaccacttactatcaatcttccctgaagtcacgggtcaccatttcaaaggataactcaaagaatcaagtgagcctcaagctctcatcagtcaccgccgctgacaccgccgtgtattactgtgccaagcattactactatggagggtcctacgccatggactactggggccagggaactctggtcactgtgtcatctggtggaggaggtagcggaggaggcgggagcggtggaggtggctccgaaatcgtgatgacccagagccctgcaaccctgtccctttctcccggggaacgggctaccctttcttgtcgggcatcacaagatatctcaaaatacctcaattggtatcaacagaagccgggacaggcccctaggcttcttatctaccacacctctcgcctgcatagcgggattcccgcacgctttagcgggtctggaagcgggaccgactacactctgaccatctcatctctccagcccgaggacttcgccgtctacttctgccagcagggtaacaccctgccgtacaccttcggccagggcaccaagcttgagatcaaacatcaccaccatcatcaccatcac

SEQ ID NO: 910 - protein, 271 aa, Artificial Sequence
  source: /note="Description of Artificial Sequence: Synthetic polypeptide"
MALPVTALLLPLALLLHAARPQVQLQESGPGLVKPSETLSLTCTVSGVSLPDYGVSWIRQPPGKGLEWIGVIWGSETTYYQSSLKSRVTISKDNSKNQVSLKLSSVTAADTAVYYCAKHYYYGGSYAMDYWGQGTLVTVSSGGGGSGGGGSGGGGSEIVMTQSPATLSLSPGERATLSCRASQDISKYLNWYQQKPGQAPRLLIYHTSRLHSGIPARFSGSGSGTDYTLTISSLQPEDFAVYFCQQGNTLPYTFGQGTKLEIKHHHHHHHH

SEQ ID NO: 911 - DNA, 1458 bp, Artificial Sequence
  source: /note="Description of Artificial Sequence: Synthetic polynucleotide"
atggctctgcccgtgaccgcactcctcctgccactggctctgctgcttcacgccgctcgcccacaagtccagcttcaagaatcagggcctggtctggtgaagccatctgagactctgtccctcacttgcaccgtgagcggagtgtccctcccagactacggagtgagctggattagacagcctcccggaaagggactggagtggatcggagtgatttggggtagcgaaaccacttactatcaatcttccctgaagtcacgggtcaccatttcaaaggataactcaaagaatcaagtgagcctcaagctctcatcagtcaccgccgctgacaccgccgtgtattactgtgccaagcattactactatggagggtcctacgccatggactactggggccagggaactctggtcactgtgtcatctggtggaggaggtagcggaggaggcgggagcggtggaggtggctccgaaatcgtgatgacccagagccctgcaaccctgtccctttctcccggggaacgggctaccctttcttgtcgggcatcacaagatatctcaaaatacctcaattggtatcaacagaagccgggacaggcccctaggcttcttatctaccacacctctcgcctgcatagcgggattcccgcacgctttagcgggtctggaagcgggaccgactacactctgaccatctcatctctccagcccgaggacttcgccgtctacttctgccagcagggtaacaccctgccgtacaccttcggccagggcaccaagcttgagatcaaaaccactactcccgctccaaggccacccacccctgccccgaccatcgcctctcagccgctttccctgcgtccggaggcatgtagacccgcagctggtggggccgtgcatacccggggtcttgacttcgcctgcgatatctacatttgggcccctctggctggtacttgcggggtcctgctgctttcactcgtgatcactctttactgtaagcgcggtcggaagaagctgctgtacatctttaagcaacccttcatgaggcctgtgcagactactcaagaggaggacggctgttcatgccggttcccagaggaggaggaaggcggctgcgaactgcgcgtgaaattcagccgcagcgcagatgctccagcctacaagcaggggcagaaccagctctacaacgaactcaatcttggtcggagagaggagtacgacgtgctggacaagcggagaggacgggacccagaaatgggcgggaagccgcgcagaaagaatccccaagagggcctgtacaacgagctccaaaaggataagatggcagaagcctatagcgagattggtatgaaaggggaacgcagaagaggcaaaggccacgacggactgtaccagggactcagcaccgccaccaaggacacctatgacgctcttcacatgcaggccctgccgcctcgg

SEQ ID NO: 912 - protein, 486 aa, Artificial Sequence
  source: /note="Description of Artificial Sequence: Synthetic polypeptide"
MALPVTALLLPLALLLHAARPQVQLQESGPGLVKPSETLSLTCTVSGVSLPDYGVSWIRQPPGKGLEWIGVIWGSETTYYQSSLKSRVTISKDNSKNQVSLKLSSVTAADTAVYYCAKHYYYGGSYAMDYWGQGTLVTVSSGGGGSGGGGSGGGGSEIVMTQSPATLSLSPGERATLSCRASQDISKYLNWYQQKPGQAPRLLIYHTSRLHSGIPARFSGSGSGTDYTLTISSLQPEDFAVYFCQQGNTLPYTFGQGTKLEIKTTTPAPRPPTPAPTIASQPLSLRPEACRPAAGGAVHTRGLDFACDIYIWAPLAGTCGVLLLSLVITLYCKRGRKKLLYIFKQPFMRPVQTTQEEDGCSCRFPEEEEGGCELRVKFSRSADAPAYKQGQNQLYNELNLGRREEYDVLDKRRGRDPEMGGKPRRKNPQEGLYNELQKDKMAEAYSEIGMKGERRRGKGHDGLYQGLSTATKDTYDALHMQALPPR

SEQ ID NO: 913 - protein, 247 aa, Artificial Sequence
  source: /note="Description of Artificial Sequence: Synthetic polypeptide"
EIVMTQSPATLSLSPGERATLSCRASQDISKYLNWYQQKPGQAPRLLIYHTSRLHSGIPARFSGSGSGTDYTLTISSLQPEDFAVYFCQQGNTLPYTFGQGTKLEIKGGGGSGGGGSGGGGSGGGGSQVQLQESGPGLVKPSETLSLTCTVSGVSLPDYGVSWIRQPPGKGLEWIGVIWGSETTYYSSSLKSRVTISKDNSKNQVSLKLSSVTAADTAVYYCAKHYYYGGSYAMDYWGQGTLVTVSS

SEQ ID NO: 914 - DNA, 828 bp, Artificial Sequence
  source: /note="Description of Artificial Sequence: Synthetic polynucleotide"
atggccctcccagtgaccgctctgctgctgcctctcgcacttcttctccatgccgctcggcctgagatcgtcatgacccaaagccccgctaccctgtccctgtcacccggcgagagggcaaccctttcatgcagggccagccaggacatttctaagtacctcaactggtatcagcagaagccagggcaggctcctcgcctgctgatctaccacaccagccgcctccacagcggtatccccgccagattttccgggagcgggtctggaaccgactacaccctcaccatctcttctctgcagcccgaggatttcgccgtctatttctgccagcaggggaatactctgccgtacaccttcggtcaaggtaccaagctggaaatcaagggaggcggaggatcaggcggtggcggaagcggaggaggtggctccggaggaggaggttcccaagtgcagcttcaagaatcaggacccggacttgtgaagccatcagaaaccctctccctgacttgtaccgtgtccggtgtgagcctccccgactacggagtctcttggattcgccagcctccggggaagggtcttgaatggattggggtgatttggggatcagagactacttactactcttcatcacttaagtcacgggtcaccatcagcaaagataatagcaagaaccaagtgtcacttaagctgtcatctgtgaccgccgctgacaccgccgtgtactattgtgccaaacattactattacggagggtcttatgctatggactactggggacaggggaccctggtgactgtctctagccatcaccatcaccaccatcatcac

SEQ ID NO: 915 - protein, 276 aa, Artificial Sequence
  source: /note="Description of Artificial Sequence: Synthetic polypeptide"
MALPVTALLLPLALLLHAARPEIVMTQSPATLSLSPGERATLSCRASQDISKYLNWYQQKPGQAPRLLIYHTSRLHSGIPARFSGSGSGTDYTLTISSLQPEDFAVYFCQQGNTLPYTFGQGTKLEIKGGGGSGGGGSGGGGSGGGGSQVQLQESGPGLVKPSETLSLTCTVSGVSLPDYGVSWIRQPPGKGLEWIGVIWGSETTYYSSSLKSRVTISKDNSKNQVSLKLSSVTAADTAVYYCAKHYYYGGSYAMDYWGQGTLVTVSSHHHHHHHH

SEQ ID NO: 916 - DNA, 1473 bp, Artificial Sequence
  source: /note="Description of Artificial Sequence: Synthetic polynucleotide"
atggccctccctgtcaccgccctgctgcttccgctggctcttctgctccacgccgctcggcccgaaattgtgatgacccagtcacccgccactcttagcctttcacccggtgagcgcgcaaccctgtcttgcagagcctcccaagacatctcaaaataccttaattggtatcaacagaagcccggacaggctcctcgccttctgatctaccacaccagccggctccattctggaatccctgccaggttcagcggtagcggatctgggaccgactacaccctcactatcagctcactgcagccagaggacttcgctgtctatttctgtcagcaagggaacaccctgccctacacctttggacagggcaccaagctcgagattaaaggtggaggtggcagcggaggaggtgggtccggcggtggaggaagcggcggaggcgggagccaggtccaactccaagaaagcggaccgggtcttgtgaagccatcagaaactctttcactgacttgtactgtgagcggagtgtctctccccgattacggggtgtcttggatcagacagccaccggggaagggtctggaatggattggagtgatttggggctctgagactacttactactcttcatccctcaagtcacgcgtcaccatctcaaaggacaactctaagaatcaggtgtcactgaaactgtcatctgtgaccgcagccgacaccgccgtgtactattgcgctaagcattactattatggcgggagctacgcaatggattactggggacagggtactctggtcaccgtgtccagcaccactaccccagcaccgaggccacccaccccggctcctaccatcgcctcccagcctctgtccctgcgtccggaggcatgtagacccgcagctggtggggccgtgcatacccggggtcttgacttcgcctgcgatatctacatttgggcccctctggctggtacttgcggggtcctgctgctttcactcgtgatcactctttactgtaagcgcggtcggaagaagctgctgtacatctttaagcaacccttcatgaggcctgtgcagactactcaagaggaggacggctgttcatgccggttcccagaggaggaggaaggcggctgcgaactgcgcgtgaaattcagccgcagcgcagatgctccagcctacaagcaggggcagaaccagctctacaacgaactcaatcttggtcggagagaggagtacgacgtgctggacaagcggagaggacgggacccagaaatgggcgggaagccgcgcagaaagaatccccaagagggcctgtacaacgagctccaaaaggataagatggcagaagcctatagcgagattggtatgaaaggggaacgcagaagaggcaaaggccacgacggactgtaccagggactcagcaccgccaccaaggacacctatgacgctcttcacatgcaggccctgccgcctcgg

SEQ ID NO: 917 - protein, 491 aa, Artificial Sequence
  source: /note="Description of Artificial Sequence: Synthetic polypeptide"
MALPVTALLLPLALLLHAARPEIVMTQSPATLSLSPGERATLSCRASQDISKYLNWYQQKPGQAPRLLIYHTSRLHSGIPARFSGSGSGTDYTLTISSLQPEDFAVYFCQQGNTLPYTFGQGTKLEIKGGGGSGGGGSGGGGSGGGGSQVQLQESGPGLVKPSETLSLTCTVSGVSLPDYGVSWIRQPPGKGLEWIGVIWGSETTYYSSSLKSRVTISKDNSKNQVSLKLSSVTAADTAVYYCAKHYYYGGSYAMDYWGQGTLVTVSSTTTPAPRPPTPAPTIASQPLSLRPEACRPAAGGAVHTRGLDFACDIYIWAPLAGTCGVLLLSLVITLYCKRGRKKLLYIFKQPFMRPVQTTQEEDGCSCRFPEEEEGGCELRVKFSRSADAPAYKQGQNQLYNELNLGRREEYDVLDKRRGRDPEMGGKPRRKNPQEGLYNELQKDKMAEAYSEIGMKGERRRGKGHDGLYQGLSTATKDTYDALHMQALPPR

SEQ ID NO: 918 - protein, 247 aa, Artificial Sequence
  source: /note="Description of Artificial Sequence: Synthetic polypeptide"
EIVMTQSPATLSLSPGERATLSCRASQDISKYLNWYQQKPGQAPRLLIYHTSRLHSGIPARFSGSGSGTDYTLTISSLQPEDFAVYFCQQGNTLPYTFGQGTKLEIKGGGGSGGGGSGGGGSGGGGSQVQLQESGPGLVKPSETLSLTCTVSGVSLPDYGVSWIRQPPGKGLEWIGVIWGSETTYYQSSLKSRVTISKDNSKNQVSLKLSSVTAADTAVYYCAKHYYYGGSYAMDYWGQGTLVTVSS

SEQ ID NO: 919 - DNA, 828 bp, Artificial Sequence
  source: /note="Description of Artificial Sequence: Synthetic polynucleotide"
atggccctcccagtgaccgctctgctgctgcctctcgcacttcttctccatgccgctcggcctgagatcgtcatgacccaaagccccgctaccctgtccctgtcacccggcgagagggcaaccctttcatgcagggccagccaggacatttctaagtacctcaactggtatcagcagaagccagggcaggctcctcgcctgctgatctaccacaccagccgcctccacagcggtatccccgccagattttccgggagcgggtctggaaccgactacaccctcaccatctcttctctgcagcccgaggatttcgccgtctatttctgccagcaggggaatactctgccgtacaccttcggtcaaggtaccaagctggaaatcaagggaggcggaggatcaggcggtggcggaagcggaggaggtggctccggaggaggaggttcccaagtgcagcttcaagaatcaggacccggacttgtgaagccatcagaaaccctctccctgacttgtaccgtgtccggtgtgagcctccccgactacggagtctcttggattcgccagcctccggggaagggtcttgaatggattggggtgatttggggatcagagactacttactaccagtcatcacttaagtcacgggtcaccatcagcaaagataatagcaagaaccaagtgtcacttaagctgtcatctgtgaccgccgctgacaccgccgtgtactattgtgccaaacattactattacggagggtcttatgctatggactactggggacaggggaccctggtgactgtctctagccatcaccatcaccaccatcatcac

SEQ ID NO: 920 - protein, 276 aa, Artificial Sequence
  source: /note="Description of Artificial Sequence: Synthetic polypeptide"
MALPVTALLLPLALLLHAARPEIVMTQSPATLSLSPGERATLSCRASQDISKYLNWYQQKPGQAPRLLIYHTSRLHSGIPARFSGSGSGTDYTLTISSLQPEDFAVYFCQQGNTLPYTFGQGTKLEIKGGGGSGGGGSGGGGSGGGGSQVQLQESGPGLVKPSETLSLTCTVSGVSLPDYGVSWIRQPPGKGLEWIGVIWGSETTYYQSSLKSRVTISKDNSKNQVSLKLSSVTAADTAVYYCAKHYYYGGSYAMDYWGQGTLVTVSSHHHHHHHH

SEQ ID NO: 921 - DNA, 1473 bp, Artificial Sequence
  source: /note="Description of Artificial Sequence: Synthetic polynucleotide"
atggccctccctgtcaccgccctgctgcttccgctggctcttctgctccacgccgctcggcccgaaattgtgatgacccagtcacccgccactcttagcctttcacccggtgagcgcgcaaccctgtcttgcagagcctcccaagacatctcaaaataccttaattggtatcaacagaagcccggacaggctcctcgccttctgatctaccacaccagccggctccattctggaatccctgccaggttcagcggtagcggatctgggaccgactacaccctcactatcagctcactgcagccagaggacttcgctgtctatttctgtcagcaagggaacaccctgccctacacctttggacagggcaccaagctcgagattaaaggtggaggtggcagcggaggaggtgggtccggcggtggaggaagcggaggcggagggagccaggtccaactccaagaaagcggaccgggtcttgtgaagccatcagaaactctttcactgacttgtactgtgagcggagtgtctctccccgattacggggtgtcttggatcagacagccaccggggaagggtctggaatggattggagtgatttggggctctgagactacttactaccaatcatccctcaagtcacgcgtcaccatctcaaaggacaactctaagaatcaggtgtcactgaaactgtcatctgtgaccgcagccgacaccgccgtgtactattgcgctaagcattactattatggcgggagctacgcaatggattactggggacagggtactctggtcaccgtgtccagcaccactaccccagcaccgaggccacccaccccggctcctaccatcgcctcccagcctctgtccctgcgtccggaggcatgtagacccgcagctggtggggccgtgcatacccggggtcttgacttcgcctgcgatatctacatttgggcccctctggctggtacttgcggggtcctgctgctttcactcgtgatcactctttactgtaagcgcggtcggaagaagctgctgtacatctttaagcaacccttcatgaggcctgtgcagactactcaagaggaggacggctgttcatgccggttcccagaggaggaggaaggcggctgcgaactgcgcgtgaaattcagccgcagcgcagatgctccagcctacaagcaggggcagaaccagctctacaacgaactcaatcttggtcggagagaggagtacgacgtgctggacaagcggagaggacgggacccagaaatgggcgggaagccgcgcagaaagaatccccaagagggcctgtacaacgagctccaaaaggataagatggcagaagcctatagcgagattggtatgaaaggggaacgcagaagaggcaaaggccacgacggactgtaccagggactcagcaccgccaccaaggacacctatgacgctcttcacatgcaggccctgccgcctcgg

SEQ ID NO: 922 - protein, 491 aa, Artificial Sequence
  source: /note="Description of Artificial Sequence: Synthetic polypeptide"
MALPVTALLLPLALLLHAARPEIVMTQSPATLSLSPGERATLSCRASQDISKYLNWYQQKPGQAPRLLIYHTSRLHSGIPARFSGSGSGTDYTLTISSLQPEDFAVYFCQQGNTLPYTFGQGTKLEIKGGGGSGGGGSGGGGSGGGGSQVQLQESGPGLVKPSETLSLTCTVSGVSLPDYGVSWIRQPPGKGLEWIGVIWGSETTYYQSSLKSRVTISKDNSKNQVSLKLSSVTAADTAVYYCAKHYYYGGSYAMDYWGQGTLVTVSSTTTPAPRPPTPAPTIASQPLSLRPEACRPAAGGAVHTRGLDFACDIYIWAPLAGTCGVLLLSLVITLYCKRGRKKLLYIFKQPFMRPVQTTQEEDGCSCRFPEEEEGGCELRVKFSRSADAPAYKQGQNQLYNELNLGRREEYDVLDKRRGRDPEMGGKPRRKNPQEGLYNELQKDKMAEAYSEIGMKGERRRGKGHDGLYQGLSTATKDTYDALHMQALPPR

SEQ ID NO: 923 - protein, 247 aa, Artificial Sequence
  source: /note="Description of Artificial Sequence: Synthetic polypeptide"
QVQLQESGPGLVKPSETLSLTCTVSGVSLPDYGVSWIRQPPGKGLEWIGVIWGSETTYYSSSLKSRVTISKDNSKNQVSLKLSSVTAADTAVYYCAKHYYYGGSYAMDYWGQGTLVTVSSGGGGSGGGGSGGGGSGGGGSEIVMTQSPATLSLSPGERATLSCRASQDISKYLNWYQQKPGQAPRLLIYHTSRLHSGIPARFSGSGSGTDYTLTISSLQPEDFAVYFCQQGNTLPYTFGQGTKLEIK

SEQ ID NO: 924 - DNA, 828 bp, Artificial Sequence
  source: /note="Description of Artificial Sequence: Synthetic polynucleotide"
atggcactgcctgtcactgccctcctgctgcctctggccctccttctgcatgccgccaggccccaagtccagctgcaagagtcaggacccggactggtgaagccgtctgagactctctcactgacttgtaccgtcagcggcgtgtccctccccgactacggagtgtcatggatccgccaacctcccgggaaagggcttgaatggattggtgtcatctggggttctgaaaccacctactactcatcttccctgaagtccagggtgaccatcagcaaggataattccaagaaccaggtcagccttaagctgtcatctgtgaccgctgctgacaccgccgtgtattactgcgccaagcactactattacggaggaagctacgctatggactattggggacagggcactctcgtgactgtgagcagcggcggtggagggtctggaggtggaggatccggtggtggtgggtcaggcggaggagggagcgagattgtgatgactcagtcaccagccaccctttctctttcacccggcgagagagcaaccctgagctgtagagccagccaggacatttctaagtacctcaactggtatcagcaaaaaccggggcaggcccctcgcctcctgatctaccatacctcacgccttcactctggtatccccgctcggtttagcggatcaggatctggtaccgactacactctgaccatttccagcctgcagccagaagatttcgcagtgtatttctgccagcagggcaatacccttccttacaccttcggtcagggaaccaagctcgaaatcaagcaccatcaccatcatcaccaccat

SEQ ID NO: 925 - protein, 276 aa, Artificial Sequence
  source: /note="Description of Artificial Sequence: Synthetic polypeptide"
MALPVTALLLPLALLLHAARPQVQLQESGPGLVKPSETLSLTCTVSGVSLPDYGVSWIRQPPGKGLEWIGVIWGSETTYYSSSLKSRVTISKDNSKNQVSLKLSSVTAADTAVYYCAKHYYYGGSYAMDYWGQGTLVTVSSGGGGSGGGGSGGGGSGGGGSEIVMTQSPATLSLSPGERATLSCRASQDISKYLNWYQQKPGQAPRLLIYHTSRLHSGIPARFSGSGSGTDYTLTISSLQPEDFAVYFCQQGNTLPYTFGQGTKLEIKHHHHHHHH

SEQ ID NO: 926 - DNA, 1473 bp, Artificial Sequence
  source: /note="Description of Artificial Sequence: Synthetic polynucleotide"
atggctctgcccgtgaccgcactcctcctgccactggctctgctgcttcacgccgctcgcccacaagtccagcttcaagaatcagggcctggtctggtgaagccatctgagactctgtccctcacttgcaccgtgagcggagtgtccctcccagactacggagtgagctggattagacagcctcccggaaagggactggagtggatcggagtgatttggggtagcgaaaccacttactattcatcttccctgaagtcacgggtcaccatttcaaaggataactcaaagaatcaagtgagcctcaagctctcatcagtcaccgccgctgacaccgccgtgtattactgtgccaagcattactactatggagggtcctacgccatggactactggggccagggaactctggtcactgtgtcatctggtggaggaggtagcggaggaggcgggagcggtggaggtggctccggaggtggcggaagcgaaatcgtgatgacccagagccctgcaaccctgtccctttctcccggggaacgggctaccctttcttgtcgggcatcacaagatatctcaaaatacctcaattggtatcaacagaagccgggacaggcccctaggcttcttatctaccacacctctcgcctgcatagcgggattcccgcacgctttagcgggtctggaagcgggaccgactacactctgaccatctcatctctccagcccgaggacttcgccgtctacttctgccagcagggtaacaccctgccgtacaccttcggccagggcaccaagcttgagatcaaaaccactactcccgctccaaggccacccacccctgccccgaccatcgcctctcagccgctttccctgcgtccggaggcatgtagacccgcagctggtggggccgtgcatacccggggtcttgacttcgcctgcgatatctacatttgggcccctctggctggtacttgcggggtcctgctgctttcactcgtgatcactctttactgtaagcgcggtcggaagaagctgctgtacatctttaagcaacccttcatgaggcctgtgcagactactcaagaggaggacggctgttcatgccggttcccagaggaggaggaaggcggctgcgaactgcgcgtgaaattcagccgcagcgcagatgctccagcctacaagcaggggcagaaccagctctacaacgaactcaatcttggtcggagagaggagtacgacgtgctggacaagcggagaggacgggacccagaaatgggcgggaagccgcgcagaaagaatccccaagagggcctgtacaacgagctccaaaaggataagatggcagaagcctatagcgagattggtatgaaaggggaacgcagaagaggcaaaggccacgacggactgtaccagggactcagcaccgccaccaaggacacctatgacgctcttcacatgcaggccctgccgcctcgg

SEQ ID NO: 927 - protein, 491 aa, Artificial Sequence
  source: /note="Description of Artificial Sequence: Synthetic polypeptide"
MALPVTALLLPLALLLHAARPQVQLQESGPGLVKPSETLSLTCTVSGVSLPDYGVSWIRQPPGKGLEWIGVIWGSETTYYSSSLKSRVTISKDNSKNQVSLKLSSVTAADTAVYYCAKHYYYGGSYAMDYWGQGTLVTVSSGGGGSGGGGSGGGGSGGGGSEIVMTQSPATLSLSPGERATLSCRASQDISKYLNWYQQKPGQAPRLLIYHTSRLHSGIPARFSGSGSGTDYTLTISSLQPEDFAVYFCQQGNTLPYTFGQGTKLEIKTTTPAPRPPTPAPTIASQPLSLRPEACRPAAGGAVHTRGLDFACDIYIWAPLAGTCGVLLLSLVITLYCKRGRKKLLYIFKQPFMRPVQTTQEEDGCSCRFPEEEEGGCELRVKFSRSADAPAYKQGQNQLYNELNLGRREEYDVLDKRRGRDPEMGGKPRRKNPQEGLYNELQKDKMAEAYSEIGMKGERRRGKGHDGLYQGLSTATKDTYDALHMQALPPR

SEQ ID NO: 928 - protein, 247 aa, Artificial Sequence
  source: /note="Description of Artificial Sequence: Synthetic polypeptide"
QVQLQESGPGLVKPSETLSLTCTVSGVSLPDYGVSWIRQPPGKGLEWIGVIWGSETTYYQSSLKSRVTISKDNSKNQVSLKLSSVTAADTAVYYCAKHYYYGGSYAMDYWGQGTLVTVSSGGGGSGGGGSGGGGSGGGGSEIVMTQSPATLSLSPGERATLSCRASQDISKYLNWYQQKPGQAPRLLIYHTSRLHSGIPARFSGSGSGTDYTLTISSLQPEDFAVYFCQQGNTLPYTFGQGTKLEIK

SEQ ID NO: 929 - DNA, 828 bp, Artificial Sequence
  source: /note="Description of Artificial Sequence: Synthetic polynucleotide"
atggcactgcctgtcactgccctcctgctgcctctggccctccttctgcatgccgccaggccccaagtccagctgcaagagtcaggacccggactggtgaagccgtctgagactctctcactgacttgtaccgtcagcggcgtgtccctccccgactacggagtgtcatggatccgccaacctcccgggaaagggcttgaatggattggtgtcatctggggttctgaaaccacctactaccagtcttccctgaagtccagggtgaccatcagcaaggataattccaagaaccaggtcagccttaagctgtcatctgtgaccgctgctgacaccgccgtgtattactgcgccaagcactactattacggaggaagctacgctatggactattggggacagggcactctcgtgactgtgagcagcggcggtggagggtctggaggtggaggatccggtggtggtgggtcaggcggaggagggagcgagattgtgatgactcagtcaccagccaccctttctctttcacccggcgagagagcaaccctgagctgtagagccagccaggacatttctaagtacctcaactggtatcagcaaaaaccggggcaggcccctcgcctcctgatctaccatacctcacgccttcactctggtatccccgctcggtttagcggatcaggatctggtaccgactacactctgaccatttccagcctgcagccagaagatttcgcagtgtatttctgccagcagggcaatacccttccttacaccttcggtcagggaaccaagctcgaaatcaagcaccatcaccatcatcatcaccac

SEQ ID NO: 930 - protein, 276 aa, Artificial Sequence
  source: /note="Description of Artificial Sequence: Synthetic polypeptide"
MALPVTALLLPLALLLHAARPQVQLQESGPGLVKPSETLSLTCTVSGVSLPDYGVSWIRQPPGKGLEWIGVIWGSETTYYQSSLKSRVTISKDNSKNQVSLKLSSVTAADTAVYYCAKHYYYGGSYAMDYWGQGTLVTVSSGGGGSGGGGSGGGGSGGGGSEIVMTQSPATLSLSPGERATLSCRASQDISKYLNWYQQKPGQAPRLLIYHTSRLHSGIPARFSGSGSGTDYTLTISSLQPEDFAVYFCQQGNTLPYTFGQGTKLEIKHHHHHHHH

SEQ ID NO: 931 - DNA, 1473 bp, Artificial Sequence
  source: /note="Description of Artificial Sequence: Synthetic polynucleotide"
atggctctgcccgtgaccgcactcctcctgccactggctctgctgcttcacgccgctcgcccacaagtccagcttcaagaatcagggcctggtctggtgaagccatctgagactctgtccctcacttgcaccgtgagcggagtgtccctcccagactacggagtgagctggattagacagcctcccggaaagggactggagtggatcggagtgatttggggtagcgaaaccacttactatcaatcttccctgaagtcacgggtcaccatttcaaaggataactcaaagaatcaagtgagcctcaagctctcatcagtcaccgccgctgacaccgccgtgtattactgtgccaagcattactactatggagggtcctacgccatggactactggggccagggaactctggtcactgtgtcatctggtggaggaggtagcggaggaggcgggagcggtggaggtggctccggaggcggtgggtcagaaatcgtgatgacccagagccctgcaaccctgtccctttctcccggggaacgggctaccctttcttgtcgggcatcacaagatatctcaaaatacctcaattggtatcaacagaagccgggacaggcccctaggcttcttatctaccacacctctcgcctgcatagcgggattcccgcacgctttagcgggtctggaagcgggaccgactacactctgaccatctcatctctccagcccgaggacttcgccgtctacttctgccagcagggtaacaccctgccgtacaccttcggccagggcaccaagcttgagatcaaaaccactactcccgctccaaggccacccacccctgccccgaccatcgcctctcagccgctttccctgcgtccggaggcatgtagacccgcagctggtggggccgtgcatacccggggtcttgacttcgcctgcgatatctacatttgggcccctctggctggtacttgcggggtcctgctgctttcactcgtgatcactctttactgtaagcgcggtcggaagaagctgctgtacatctttaagcaacccttcatgaggcctgtgcagactactcaagaggaggacggctgttcatgccggttcccagaggaggaggaaggcggctgcgaactgcgcgtgaaattcagccgcagcgcagatgctccagcctacaagcaggggcagaaccagctctacaacgaactcaatcttggtcggagagaggagtacgacgtgctggacaagcggagaggacgggacccagaaatgggcgggaagccgcgcagaaagaatccccaagagggcctgtacaacgagctccaaaaggataagatggcagaagcctatagcgagattggtatgaaaggggaacgcagaagaggcaaaggccacgacggactgtaccagggactcagcaccgccaccaaggacacctatgacgctcttcacatgcaggccctgccgcctcgg

SEQ ID NO: 932 - protein, 491 aa, Artificial Sequence
  source: /note="Description of Artificial Sequence: Synthetic polypeptide"
MALPVTALLLPLALLLHAARPQVQLQESGPGLVKPSETLSLTCTVSGVSLPDYGVSWIRQPPGKGLEWIGVIWGSETTYYQSSLKSRVTISKDNSKNQVSLKLSSVTAADTAVYYCAKHYYYGGSYAMDYWGQGTLVTVSSGGGGSGGGGSGGGGSGGGGSEIVMTQSPATLSLSPGERATLSCRASQDISKYLNWYQQKPGQAPRLLIYHTSRLHSGIPARFSGSGSGTDYTLTISSLQPEDFAVYFCQQGNTLPYTFGQGTKLEIKTTTPAPRPPTPAPTIASQPLSLRPEACRPAAGGAVHTRGLDFACDIYIWAPLAGTCGVLLLSLVITLYCKRGRKKLLYIFKQPFMRPVQTTQEEDGCSCRFPEEEEGGCELRVKFSRSADAPAYKQGQNQLYNELNLGRREEYDVLDKRRGRDPEMGGKPRRKNPQEGLYNELQKDKMAEAYSEIGMKGERRRGKGHDGLYQGLSTATKDTYDALHMQALPPR

SEQ ID NO: 933 - protein, 247 aa, Artificial Sequence
  source: /note="Description of Artificial Sequence: Synthetic polypeptide"
EIVMTQSPATLSLSPGERATLSCRASQDISKYLNWYQQKPGQAPRLLIYHTSRLHSGIPARFSGSGSGTDYTLTISSLQPEDFAVYFCQQGNTLPYTFGQGTKLEIKGGGGSGGGGSGGGGSGGGGSQVQLQESGPGLVKPSETLSLTCTVSGVSLPDYGVSWIRQPPGKGLEWIGVIWGSETTYYNSSLKSRVTISKDNSKNQVSLKLSSVTAADTAVYYCAKHYYYGGSYAMDYWGQGTLVTVSS

SEQ ID NO: 934 - DNA, 828 bp, Artificial Sequence
  source: /note="Description of Artificial Sequence: Synthetic polynucleotide"
atggccctcccagtgaccgctctgctgctgcctctcgcacttcttctccatgccgctcggcctgagatcgtcatgacccaaagccccgctaccctgtccctgtcacccggcgagagggcaaccctttcatgcagggccagccaggacatttctaagtacctcaactggtatcagcagaagccagggcaggctcctcgcctgctgatctaccacaccagccgcctccacagcggtatccccgccagattttccgggagcgggtctggaaccgactacaccctcaccatctcttctctgcagcccgaggatttcgccgtctatttctgccagcaggggaatactctgccgtacaccttcggtcaaggtaccaagctggaaatcaagggaggcggaggatcaggcggtggcggaagcggaggaggtggctccggaggaggaggttcccaagtgcagcttcaagaatcaggacccggacttgtgaagccatcagaaaccctctccctgacttgtaccgtgtccggtgtgagcctccccgactacggagtctcttggattcgccagcctccggggaagggtcttgaatggattggggtgatttggggatcagagactacttactacaattcatcacttaagtcacgggtcaccatcagcaaagataatagcaagaaccaagtgtcacttaagctgtcatctgtgaccgccgctgacaccgccgtgtactattgtgccaaacattactattacggagggtcttatgctatggactactggggacaggggaccctggtgactgtctctagccatcaccatcaccaccatcatcac

SEQ ID NO: 935 - protein, 276 aa, Artificial Sequence
  source: /note="Description of Artificial Sequence: Synthetic polypeptide"
MALPVTALLLPLALLLHAARPEIVMTQSPATLSLSPGERATLSCRASQDISKYLNWYQQKPGQAPRLLIYHTSRLHSGIPARFSGSGSGTDYTLTISSLQPEDFAVYFCQQGNTLPYTFGQGTKLEIKGGGGSGGGGSGGGGSGGGGSQVQLQESGPGLVKPSETLSLTCTVSGVSLPDYGVSWIRQPPGKGLEWIGVIWGSETTYYNSSLKSRVTISKDNSKNQVSLKLSSVTAADTAVYYCAKHYYYGGSYAMDYWGQGTLVTVSSHHHHHHHH

SEQ ID NO: 936 - DNA, 1473 bp, Artificial Sequence
  source: /note="Description of Artificial Sequence: Synthetic polynucleotide"
atggccctccctgtcaccgccctgctgcttccgctggctcttctgctccacgccgctcggcccgaaattgtgatgacccagtcacccgccactcttagcctttcacccggtgagcgcgcaaccctgtcttgcagagcctcccaagacatctcaaaataccttaattggtatcaacagaagcccggacaggctcctcgccttctgatctaccacaccagccggctccattctggaatccctgccaggttcagcggtagcggatctgggaccgactacaccctcactatcagctcactgcagccagaggacttcgctgtctatttctgtcagcaagggaacaccctgccctacacctttggacagggcaccaagctcgagattaaaggtggaggtggcagcggaggaggtgggtccggcggtggaggaagcggaggcggtgggagccaggtccaactccaagaaagcggaccgggtcttgtgaagccatcagaaactctttcactgacttgtactgtgagcggagtgtctctccccgattacggggtgtcttggatcagacagccaccggggaagggtctggaatggattggagtgatttggggctctgagactacttactacaactcatccctcaagtcacgcgtcaccatctcaaaggacaactctaagaatcaggtgtcactgaaactgtcatctgtgaccgcagccgacaccgccgtgtactattgcgctaagcattactattatggcgggagctacgcaatggattactggggacagggtactctggtcaccgtgtccagcaccactaccccagcaccgaggccacccaccccggctcctaccatcgcctcccagcctctgtccctgcgtccggaggcatgtagacccgcagctggtggggccgtgcatacccggggtcttgacttcgcctgcgatatctacatttgggcccctctggctggtacttgcggggtcctgctgctttcactcgtgatcactctttactgtaagcgcggtcggaagaagctgctgtacatctttaagcaacccttcatgaggcctgtgcagactactcaagaggaggacggctgttcatgccggttcccagaggaggaggaaggcggctgcgaactgcgcgtgaaattcagccgcagcgcagatgctccagcctacaagcaggggcagaaccagctctacaacgaactcaatcttggtcggagagaggagtacgacgtgctggacaagcggagaggacgggacccagaaatgggcgggaagccgcgcagaaagaatccccaagagggcctgtacaacgagctccaaaaggataagatggcagaagcctatagcgagattggtatgaaaggggaacgcagaagaggcaaaggccacgacggactgtaccagggactcagcaccgccaccaaggacacctatgacgctcttcacatgcaggccctgccgcctcgg

SEQ ID NO: 937 - protein, 491 aa, Artificial Sequence
  source: /note="Description of Artificial Sequence: Synthetic polypeptide"
MALPVTALLLPLALLLHAARPEIVMTQSPATLSLSPGERATLSCRASQDISKYLNWYQQKPGQAPRLLIYHTSRLHSGIPARFSGSGSGTDYTLTISSLQPEDFAVYFCQQGNTLPYTFGQGTKLEIKGGGGSGGGGSGGGGSGGGGSQVQLQESGPGLVKPSETLSLTCTVSGVSLPDYGVSWIRQPPGKGLEWIGVIWGSETTYYNSSLKSRVTISKDNSKNQVSLKLSSVTAADTAVYYCAKHYYYGGSYAMDYWGQGTLVTVSSTTTPAPRPPTPAPTIASQPLSLRPEACRPAAGGAVHTRGLDFACDIYIWAPLAGTCGVLLLSLVITLYCKRGRKKLLYIFKQPFMRPVQTTQEEDGCSCRFPEEEEGGCELRVKFSRSADAPAYKQGQNQLYNELNLGRREEYDVLDKRRGRDPEMGGKPRRKNPQEGLYNELQKDKMAEAYSEIGMKGERRRGKGHDGLYQGLSTATKDTYDALHMQALPPR

SEQ ID NO: 938 - protein, 247 aa, Artificial Sequence
  source: /note="Description of Artificial Sequence: Synthetic polypeptide"
QVQLQESGPGLVKPSETLSLTCTVSGVSLPDYGVSWIRQPPGKGLEWIGVIWGSETTYYNSSLKSRVTISKDNSKNQVSLKLSSVTAADTAVYYCAKHYYYGGSYAMDYWGQGTLVTVSSGGGGSGGGGSGGGGSGGGGSEIVMTQSPATLSLSPGERATLSCRASQDISKYLNWYQQKPGQAPRLLIYHTSRLHSGIPARFSGSGSGTDYTLTISSLQPEDFAVYFCQQGNTLPYTFGQGTKLEIK

SEQ ID NO: 939 - DNA, 828 bp, Artificial Sequence
  source: /note="Description of Artificial Sequence: Synthetic polynucleotide"
atggcactgcctgtcactgccctcctgctgcctctggccctccttctgcatgccgccaggccccaagtccagctgcaagagtcaggacccggactggtgaagccgtctgagactctctcactgacttgtaccgtcagcggcgtgtccctccccgactacggagtgtcatggatccgccaacctcccgggaaagggcttgaatggattggtgtcatctggggttctgaaaccacctactacaactcttccctgaagtccagggtgaccatcagcaaggataattccaagaaccaggtcagccttaagctgtcatctgtgaccgctgctgacaccgccgtgtattactgcgccaagcactactattacggaggaagctacgctatggactattggggacagggcactctcgtgactgtgagcagcggcggtggagggtctggaggtggaggatccggtggtggtgggtcaggcggaggagggagcgagattgtgatgactcagtcaccagccaccctttctctttcacccggcgagagagcaaccctgagctgtagagccagccaggacatttctaagtacctcaactggtatcagcaaaaaccggggcaggcccctcgcctcctgatctaccatacctcacgccttcactctggtatccccgctcggtttagcggatcaggatctggtaccgactacactctgaccatttccagcctgcagccagaagatttcgcagtgtatttctgccagcagggcaatacccttccttacaccttcggtcagggaaccaagctcgaaatcaagcaccatcaccatcatcaccaccat

SEQ ID NO: 940 - protein, 276 aa, Artificial Sequence
  source: /note="Description of Artificial Sequence: Synthetic polypeptide"
MALPVTALLLPLALLLHAARPQVQLQESGPGLVKPSETLSLTCTVSGVSLPDYGVSWIRQPPGKGLEWIGVIWGSETTYYNSSLKSRVTISKDNSKNQVSLKLSSVTAADTAVYYCAKHYYYGGSYAMDYWGQGTLVTVSSGGGGSGGGGSGGGGSGGGGSEIVMTQSPATLSLSPGERATLSCRASQDISKYLNWYQQKPGQAPRLLIYHTSRLHSGIPARFSGSGSGTDYTLTISSLQPEDFAVYFCQQGNTLPYTFGQGTKLEIKHHHHHHHH

SEQ ID NO: 941 - DNA, 1473 bp, Artificial Sequence; identical to SEQ ID NO: 936
  source: /note="Description of Artificial Sequence: Synthetic polynucleotide"

SEQ ID NO: 942 - protein, 491 aa, Artificial Sequence; identical to SEQ ID NO: 937
  source: /note="Description of Artificial Sequence: Synthetic polypeptide"

SEQ ID NO: 943 - protein, 242 aa, Artificial Sequence
  source: /note="Description of Artificial Sequence: Synthetic polypeptide"
EIVMTQSPATLSLSPGERATLSCRASQDISKYLNWYQQKPGQAPRLLIYHTSRLHSGIPARFSGSGSGTDYTLTISSLQPEDFAVYFCQQGNTLPYTFGQGTKLEIKGGGGSGGGGSGGGGSQVQLQESGPGLVKPSETLSLTCTVSGVSLPDYGVSWIRQPPGKGLEWIGVIWGSETTYYNSSLKSRVTISKDNSKNQVSLKLSSVTAADTAVYYCAKHYYYGGSYAMDYWGQGTLVTVSS

SEQ ID NO: 944 - DNA, 813 bp, Artificial Sequence
  source: /note="Description of Artificial Sequence: Synthetic polynucleotide"
atggccctccctgtcaccgccctgctgcttccgctggctcttctgctccacgccgctcggcccgaaattgtgatgacccagtcacccgccactcttagcctttcacccggtgagcgcgcaaccctgtcttgcagagcctcccaagacatctcaaaataccttaattggtatcaacagaagcccggacaggctcctcgccttctgatctaccacaccagccggctccattctggaatccctgccaggttcagcggtagcggatctgggaccgactacaccctcactatcagctcactgcagccagaggacttcgctgtctatttctgtcagcaagggaacaccctgccctacacctttggacagggcaccaagctcgagattaaaggtggaggtggcagcggaggaggtgggtccggcggtggaggaagccaggtccaactccaagaaagcggaccgggtcttgtgaagccatcagaaactctttcactgacttgtactgtgagcggagtgtctctccccgattacggggtgtcttggatcagacagccaccggggaagggtctggaatggattggagtgatttggggctctgagactacttactacaattcatccctcaagtcacgcgtcaccatctcaaaggacaactctaagaatcaggtgtcactgaaactgtcatctgtgaccgcagccgacaccgccgtgtactattgcgctaagcattactattatggcgggagctacgcaatggattactggggacagggtactctggtcaccgtgtccagccaccaccatcatcaccatcaccat

SEQ ID NO: 945 - protein, 271 aa, Artificial Sequence
  source: /note="Description of Artificial Sequence: Synthetic polypeptide"
MALPVTALLLPLALLLHAARPEIVMTQSPATLSLSPGERATLSCRASQDISKYLNWYQQKPGQAPRLLIYHTSRLHSGIPARFSGSGSGTDYTLTISSLQPEDFAVYFCQQGNTLPYTFGQGTKLEIKGGGGSGGGGSGGGGSQVQLQESGPGLVKPSETLSLTCTVSGVSLPDYGVSWIRQPPGKGLEWIGVIWGSETTYYNSSLKSRVTISKDNSKNQVSLKLSSVTAADTAVYYCAKHYYYGGSYAMDYWGQGTLVTVSSHHHHHHHH

SEQ ID NO: 946 - DNA, 1473 bp, Artificial Sequence
  source: /note="Description of Artificial Sequence: Synthetic polynucleotide"
atggctctgcccgtgaccgcactcctcctgccactggctctgctgcttcacgccgctcgcccacaagtccagcttcaagaatcagggcctggtctggtgaagccatctgagactctgtccctcacttgcaccgtgagcggagtgtccctcccagactacggagtgagctggattagacagcctcccggaaagggactggagtggatcggagtgatttggggtagcgaaaccacttactataactcttccctgaagtcacgggtcaccatttcaaaggataactcaaagaatcaagtgagcctcaagctctcatcagtcaccgccgctgacaccgccgtgtattactgtgccaagcattactactatggagggtcctacgccatggactactggggccagggaactctggtcactgtgtcatctggtggaggaggtagcggaggaggcgggagcggtggaggtggctccggaggtggcggaagcgaaatcgtgatgacccagagccctgcaaccctgtccctttctcccggggaacgggctaccctttcttgtcgggcatcacaagatatctcaaaatacctcaattggtatcaacagaagccgggacaggcccctaggcttcttatctaccacacctctcgcctgcatagcgggattcccgcacgctttagcgggtctggaagcgggaccgactacactctgaccatctcatctctccagcccgaggacttcgccgtctacttctgccagcagggtaacaccctgccgtacaccttcggccagggcaccaagcttgagatcaaaaccactactcccgctccaaggccacccacccctgccccgaccatcgcctctcagccgctttccctgcgtccggaggcatgtagacccgcagctggtggggccgtgcatacccggggtcttgacttcgcctgcgatatctacatttgggcccctctggctggtacttgcggggtcctgctgctttcactcgtgatcactctttactgtaagcgcggtcggaagaagctgctgtacatctttaagcaacccttcatgaggcctgtgcagactactcaagaggaggacggctgttcatgccggttcccagaggaggaggaaggcggctgcgaactgcgcgtgaaattcagccgcagcgcagatgctccagcctacaagcaggggcagaaccagctctacaacgaactcaatcttggtcggagagaggagtacgacgtgctggacaagcggagaggacgggacccagaaatgggcgggaagccgcgcagaaagaatccccaagagggcctgtacaacgagctccaaaaggataagatggcagaagcctatagcgagattggtatgaaaggggaacgcagaagaggcaaaggccacgacggactgtaccagggactcagcaccgccaccaaggacacctatgacgctcttcacatgcaggccctgccgcctcgg

SEQ ID NO: 947 - protein, 491 aa, Artificial Sequence
  source: /note="Description of Artificial Sequence: Synthetic polypeptide"
MALPVTALLLPLALLLHAARPQVQLQESGPGLVKPSETLSLTCTVSGVSLPDYGVSWIRQPPGKGLEWIGVIWGSETTYYNSSLKSRVTISKDNSKNQVSLKLSSVTAADTAVYYCAKHYYYGGSYAMDYWGQGTLVTVSSGGGGSGGGGSGGGGSGGGGSEIVMTQSPATLSLSPGERATLSCRASQDISKYLNWYQQKPGQAPRLLIYHTSRLHSGIPARFSGSGSGTDYTLTISSLQPEDFAVYFCQQGNTLPYTFGQGTKLEIKTTTPAPRPPTPAPTIASQPLSLRPEACRPAAGGAVHTRGLDFACDIYIWAPLAGTCGVLLLSLVITLYCKRGRKKLLYIFKQPFMRPVQTTQEEDGCSCRFPEEEEGGCELRVKFSRSADAPAYKQGQNQLYNELNLGRREEYDVLDKRRGRDPEMGGKPRRKNPQEGLYNELQKDKMAEAYSEIGMKGERRRGKGHDGLYQGLSTATKDTYDALHMQALPPR

SEQ ID NO: 948 - protein, 242 aa, Artificial Sequence
  source: /note="Description of Artificial Sequence: Synthetic polypeptide"
QVQLQESGPGLVKPSETLSLTCTVSGVSLPDYGVSWIRQPPGKGLEWIGVIWGSETTYYNSSLKSRVTISKDNSKNQVSLKLSSVTAADTAVYYCAKHYYYGGSYAMDYWGQGTLVTVSSGGGGSGGGGSGGGGSEIVMTQSPATLSLSPGERATLSCRASQDISKYLNWYQQKPGQAPRLLIYHTSRLHSGIPARFSGSGSGTDYTLTISSLQPEDFAVYFCQQGNTLPYTFGQGTKLEIK

SEQ ID NO: 949 - DNA, 813 bp, Artificial Sequence
  source: /note="Description of Artificial Sequence: Synthetic polynucleotide"
atggctctgcccgtgaccgcactcctcctgccactggctctgctgcttcacgccgctcgcccacaagtccagcttcaagaatcagggcctggtctggtgaagccatctgagactctgtccctcacttgcaccgtgagcggagtgtccctcccagactacggagtgagctggattagacagcctcccggaaagggactggagtggatcggagtgatttggggtagcgaaaccacttactataactcttccctgaagtcacgggtcaccatttcaaaggataactcaaagaatcaagtgagcctcaagctctcatcagtcaccgccgctgacaccgccgtgtattactgtgccaagcattactactatggagggtcctacgccatggactactggggccagggaactctggtcactgtgtcatctggtggaggaggtagcggaggaggcgggagcggtggaggtggctccgaaatcgtgatgacccagagccctgcaaccctgtccctttctcccggggaacgggctaccctttcttgtcgggcatcacaagatatctcaaaatacctcaattggtatcaacagaagccgggacaggcccctaggcttcttatctaccacacctctcgcctgcatagcgggattcccgcacgctttagcgggtctggaagcgggaccgactacactctgaccatctcatctctccagcccgaggacttcgccgtctacttctgccagcagggtaacaccctgccgtacaccttcggccagggcaccaagcttgagatcaaacatcaccaccatcatcaccatcac

SEQ ID NO: 950 - protein, 271 aa, Artificial Sequence
  source: /note="Description of Artificial Sequence: Synthetic polypeptide"
MALPVTALLLPLALLLHAARPQVQLQESGPGLVKPSETLSLTCTVSGVSLPDYGVSWIRQPPGKGLEWIGVIWGSETTYYNSSLKSRVTISKDNSKNQVSLKLSSVTAADTAVYYCAKHYYYGGSYAMDYWGQGTLVTVSSGGGGSGGGGSGGGGSEIVMTQSPATLSLSPGERATLSCRASQDISKYLNWYQQKPGQAPRLLIYHTSRLHSGIPARFSGSGSGTDYTLTISSLQPEDFAVYFCQQGNTLPYTFGQGTKLEIKHHHHHHHH

SEQ ID NO: 951 - DNA, 1458 bp, Artificial Sequence
  source: /note="Description of Artificial Sequence: Synthetic polynucleotide"
atggccctccctgtcaccgccctgctgcttccgctggctcttctgctccacgccgctcggcccgaaattgtgatgacccagtcacccgccactcttagcctttcacccggtgagcgcgcaaccctgtcttgcagagcctcccaagacatctcaaaataccttaattggtatcaacagaagcccggacaggctcctcgccttctgatctaccacaccagccggctccattctggaatccctgccaggttcagcggtagcggatctgggaccgactacaccctcactatcagctcactgcagccagaggacttcgctgtctatttctgtcagcaagggaacaccctgccctacacctttggacagggcaccaagctcgagattaaaggtggaggtggcagcggaggaggtgggtccggcggtggaggaagccaggtccaactccaagaaagcggaccgggtcttgtgaagccatcagaaactctttcactgacttgtactgtgagcggagtgtctctccccgattacggggtgtcttggatcagacagccaccggggaagggtctggaatggattggagtgatttggggctctgagactacttactacaactcatccctcaagtcacgcgtcaccatctcaaaggacaactctaagaatcaggtgtcactgaaactgtcatctgtgaccgcagccgacaccgccgtgtactattgcgctaagcattactattatggcgggagctacgcaatggattactggggacagggtactctggtcaccgtgtccagcaccactaccccagcaccgaggccacccaccccggctcctaccatcgcctcccagcctctgtccctgcgtccggaggcatgtagacccgcagctggtggggccgtgcatacccggggtcttgacttcgcctgcgatatctacatttgggcccctctggctggtacttgcggggtcctgctgctttcactcgtgatcactctttactgtaagcgcggtcggaagaagctgctgtacatctttaagcaacccttcatgaggcctgtgcagactactcaagaggaggacggctgttcatgccggttcccagaggaggaggaaggcggctgcgaactgcgcgtgaaattcagccgcagcgcagatgctccagcctacaagcaggggcagaaccagctctacaacgaactcaatcttggtcggagagaggagtacgacgtgctggacaagcggagaggacgggacccagaaatgggcgggaagccgcgcagaaagaatccccaagagggcctgtacaacgagctccaaaaggataagatggcagaagcctatagcgagattggtatgaaaggggaacgcagaagaggcaaaggccacgacggactgtaccagggactcagcaccgccaccaaggacacctatgacgctcttcacatgcaggccctgccgcctcgg

SEQ ID NO: 952 - protein, 486 aa, Artificial Sequence
  source: /note="Description of Artificial Sequence: Synthetic polypeptide"
MALPVTALLLPLALLLHAARPEIVMTQSPATLSLSPGERATLSCRASQDISKYLNWYQQKPGQAPRLLIYHTSRLHSGIPARFSGSGSGTDYTLTISSLQPEDFAVYFCQQGNTLPYTFGQGTKLEIKGGGGSGGGGSGGGGSQVQLQESGPGLVKPSETLSLTCTVSGVSLPDYGVSWIRQPPGKGLEWIGVIWGSETTYYNSSLKSRVTISKDNSKNQVSLKLSSVTAADTAVYYCAKHYYYGGSYAMDYWGQGTLVTVSSTTTPAPRPPTPAPTIASQPLSLRPEACRPAAGGAVHTRGLDFACDIYIWAPLAGTCGVLLLSLVITLYCKRGRKKLLYIFKQPFMRPVQTTQEEDGCSCRFPEEEEGGCELRVKFSRSADAPAYKQGQNQLYNELNLGRREEYDVLDKRRGRDPEMGGKPRRKNPQEGLYNELQKDKMAEAYSEIGMKGERRRGKGHDGLYQGLSTATKDTYDALHMQALPPR

SEQ ID NO: 953 - DNA, 813 bp, Artificial Sequence
  source: /note="Description of Artificial Sequence: Synthetic polynucleotide"
atggccctgcccgtcaccgctctgctgctgccccttgctctgcttcttcatgcagcaaggccggacatccagatgacccaaaccacctcatccctctctgcctctcttggagacagggtgaccatttcttgtcgcgccagccaggacatcagcaagtatctgaactggtatcagcagaagccggacggaaccgtgaagctcctgatctaccatacctctcgcctgcatagcggcgtgccctcacgcttctctggaagcggatcaggaaccgattattctctcactatttcaaatcttgagcaggaagatattgccacctatttctgccagcagggtaataccctgccctacaccttcggaggagggaccaagctcgaaatcaccggtggaggaggcagcggcggtggagggtctggtggaggtggttctgaggtgaagctgcaagaatcaggccctggacttgtggccccttcacagtccctgagcgtgacttgcaccgtgtccggagtctccctgcccgactacggagtgtcatggatcagacaacctccacggaaaggactggaatggctcggtgtcatctggggtagcgaaactacttactacaattcagccctcaaaagcaggctgactattatcaaggacaacagcaagtcccaagtctttcttaagatgaactcactccagactgacgacaccgcaatctactattgtgctaagcactactactacggaggatcctacgctatggattactggggacaaggtacttccgtcactgtctcttcacaccatcatcaccatcaccatcac

SEQ ID NO: 954 - protein, 271 aa, Artificial Sequence
  source: /note="Description of Artificial Sequence: Synthetic polypeptide"
MALPVTALLLPLALLLHAARPDIQMTQTTSSLSASLGDRVTISCRASQDISKYLNWYQQKPDGTVKLLIYHTSRLHSGVPSRFSGSGSGTDYSLTISNLEQEDIATYFCQQGNTLPYTFGGGTKLEITGGGGSGGGGSGGGGSEVKLQESGPGLVAPSQSLSVTCTVSGVSLPDYGVSWIRQPPRKGLEWLGVIWGSETTYYNSALKSRLTIIKDNSKSQVFLKMNSLQTDDTAIYYCAKHYYYGGSYAMDYWGQGTSVTVSSHHHHHHHH

SEQ ID NO: 955 - DNA, 1458 bp, Artificial Sequence
  source: /note="Description of Artificial Sequence: Synthetic polynucleotide"
atggccttaccagtgaccgccttgctcctgccgctggccttgctgctccacgccgccaggccggacatccagatgacacagactacatcctccctgtctgcctctctgggagacagagtcaccatcagttgcagggcaagtcaggacattagtaaatatttaaattggtatcagcagaaaccagatggaactgttaaactcctgatctaccatacatcaagattacactcaggagtcccatcaaggttcagtggcagtgggtctggaacagattattctctcaccattagcaacctggagcaagaagatattgccacttacttttgccaacagggtaatacgcttccgtacacgttcggaggggggaccaagctggagatcacaggtggcggtggctcgggcggtggtgggtcgggtggcggcggatctgaggtgaaactgcaggagtcaggacctggcctggtggcgccctcacagagcctgtccgtcacatgcactgtctcaggggtctcattacccgactatggtgtaagctggattcgccagcctccacgaaagggtctggagtggctgggagtaatatggggtagtgaaaccacatactataattcagctctcaaatccagactgaccatcatcaaggacaactccaagagccaagttttcttaaaaatgaacagtctgcaaactgatgacacagccatttactactgtgccaaacattattactacggtggtagctatgctatggactactggggccaaggaacctcagtcaccgtctcctcaaccacgacgccagcgccgcgaccaccaacaccggcgcccaccatcgcgtcgcagcccctgtccctgcgcccagaggcgtgccggccagcggcggggggcgcagtgcacacgagggggctggacttcgcctgtgatatctacatctgggcgcccttggccgggacttgtggggtccttctcctgtcactggttatcaccctttactgcaaacggggcagaaagaaactcctgtatatattcaaacaaccatttatgagaccagtacaaactactcaagaggaagatggctgtagctgccgatttccagaagaagaagaaggaggatgtgaactgagagtgaagttcagcaggagcgcagacgcccccgcgtacaagcagggccagaaccagctctataacgagctcaatctaggacgaagagaggagtacgatgttttggacaagagacgtggccgggaccctgagatggggggaaagccgagaaggaagaaccctcaggaaggcctgtacaatgaactgcagaaagataagatggcggaggcctacagtgagattgggatgaaaggcgagcgccggaggggcaaggggcacgatggcctttaccagggtctcagtacagccaccaaggacacctacgacgcccttcacatgcaggccctgccccctcgc

SEQ ID NO: 956 - protein, 486 aa, Artificial Sequence; identical to SEQ ID NO: 891
  source: /note="Description of Artificial Sequence: Synthetic polypeptide"

SEQ ID NO: 957 - protein, 242 aa, Artificial Sequence
  source: /note="Description of Artificial Sequence: Synthetic polypeptide"
DIQMTQTTSSLSASLGDRVTISCRASQDISKYLNWYQQKPDGTVKLLIYHTSRLHSGVPSRFSGSGSGTDYSLTISNLEQEDIATYFCQQGNTLPYTFGGGTKLEITGGGGSGGGGSGGGGSEVKLQESGPGLVAPSQSLSVTCTVSGVSLPDYGVSWIRQPPRKGLEWLGVIWGSETTYYNSALKSRLTIIKDNSKSQVFLKMNSLQTDDTAIYYCAKHYYYGGSYAMDYWGQGTSVTVSS

SEQ ID NO: 958 - protein, 5 aa, Artificial Sequence
  source: /note="Description of Artificial Sequence: Synthetic peptide"
DYGVS

SEQ ID NO: 959 - protein, 16 aa, Artificial Sequence
  source: /note="Description of Artificial Sequence: Synthetic peptide"
VIWGSETTYYNSALKS

SEQ ID NO: 960 - protein, 12 aa, Artificial Sequence
  source: /note="Description of Artificial Sequence: Synthetic peptide"
HYYYGGSYAMDY

SEQ ID NO: 961 - protein, 16 aa, Artificial Sequence
  source: /note="Description of Artificial Sequence: Synthetic peptide"
VIWGSETTYYSSSLKS

SEQ ID NO: 962 - protein, 16 aa, Artificial Sequence
  source: /note="Description of Artificial Sequence: Synthetic peptide"
VIWGSETTYYQSSLKS

SEQ ID NO: 963 - protein, 16 aa, Artificial Sequence
  source: /note="Description of Artificial Sequence: Synthetic peptide"
VIWGSETTYYNSSLKS

SEQ ID NO: 964 - protein, 11 aa, Artificial Sequence
  source: /note="Description of Artificial Sequence: Synthetic peptide"
RASQDISKYLN

SEQ ID NO: 965 - protein, 7 aa, Artificial Sequence
  source: /note="Description of Artificial Sequence: Synthetic peptide"
HTSRLHS

SEQ ID NO: 966 - protein, 9 aa, Artificial Sequence
  source: /note="Description of Artificial Sequence: Synthetic peptide"
QQGNTLPYT

SEQ ID NO: 967 - protein, 239 aa, Artificial Sequence
  source: /note="Description of Artificial Sequence: Synthetic polypeptide"
EVQLVESGGGLVQPGGSLRLSCAVSGFALSNHGMSWVRRAPGKGLEWVSGIVYSGSTYYAASVKGRFTISRDNSRNTLYLQMNSLRPEDTAIYYCSAHGGESDVWGQGTTVTVSSASGGGGSGGRASGGGGSDIQLTQSPSSLSASVGDRVTITCRASQSISSYLNWYQQKPGKAPKLLIYAASSLQSGVPSRFSGSGSGTDFTLTISSLQPEDFATYYCQQSYSTPYTFGQGTKVEIK

SEQ ID NO: 968 - DNA, 717 bp, Artificial Sequence
  source: /note="Description of Artificial Sequence: Synthetic polynucleotide"
gaagtgcaattggtggaatcagggggaggacttgtgcagcctggaggatcgctgagactgtcatgtgccgtgtccggctttgccctgtccaaccacgggatgtcctgggtccgccgcgcgcctggaaagggcctcgaatgggtgtcgggtattgtgtacagcggtagcacctactatgccgcatccgtgaaggggagattcaccatcagccgggacaactccaggaacactctgtacctccaaatgaattcgctgaggccagaggacactgccatctactactgctccgcgcatggcggagagtccgacgtctggggacaggggaccaccgtgaccgtgtctagcgcgtccggcggaggcggcagcgggggtcgggcatcagggggcggcggatcggacatccagctcacccagtccccgagctcgctgtccgcctccgtgggagatcgggtcaccatcacgtgccgcgccagccagtcgatttcctcctacctgaactggtaccaacagaagcccggaaaagccccgaagcttctcatctacgccgcctcgagcctgcagtcaggagtgccctcacggttctccggctccggttccggtactgatttcaccctgaccatttcctccctgcaaccggaggacttcgctacttactactgccagcagtcgtactccaccccctacactttcggacaaggcaccaaggtcgaaatcaag

SEQ ID NO: 969 - protein, 115 aa, Artificial Sequence
  source: /note="Description of Artificial Sequence: Synthetic polypeptide"
EVQLVESGGGLVQPGGSLRLSCAVSGFALSNHGMSWVRRAPGKGLEWVSGIVYSGSTYYAASVKGRFTISRDNSRNTLYLQMNSLRPEDTAIYYCSAHGGESDVWGQGTTVTVSS

SEQ ID NO: 970 - protein, 107 aa, Artificial Sequence
  source: /note="Description of Artificial Sequence: Synthetic polypeptide"
DIQLTQSPSSLSASVGDRVTITCRASQSISSYLNWYQQKPGKAPKLLIYAASSLQSGVPSRFSGSGSGTDFTLTISSLQPEDFATYYCQQSYSTPYTFGQGTKVEIK

SEQ ID NO: 971 - protein, 483 aa, Artificial Sequence
  source: /note="Description of Artificial Sequence: Synthetic polypeptide"
MALPVTALLLPLALLLHAARPEVQLVESGGGLVQPGGSLRLSCAVSGFALSNHGMSWVRRAPGKGLEWVSGIVYSGSTYYAASVKGRFTISRDNSRNTLYLQMNSLRPEDTAIYYCSAHGGESDVWGQGTTVTVSSASGGGGSGGRASGGGGSDIQLTQSPSSLSASVGDRVTITCRASQSISSYLNWYQQKPGKAPKLLIYAASSLQSGVPSRFSGSGSGTDFTLTISSLQPEDFATYYCQQSYSTPYTFGQGTKVEIKTTTPAPRPPTPAPTIASQPLSLRPEACRPAAGGAVHTRGLDFACDIYIWAPLAGTCGVLLLSLVITLYCKRGRKKLLYIFKQPFMRPVQTTQEEDGCSCRFPEEEEGGCELRVKFSRSADAPAYKQGQNQLYNELNLGRREEYDVLDKRRGRDPEMGGKPRRKNPQEGLYNELQKDKMAEAYSEIGMKGERRRGKGHDGLYQGLSTATKDTYDALHMQALPPR

SEQ ID NO: 972 - DNA, 1449 bp, Artificial Sequence
  source: /note="Description of Artificial Sequence: Synthetic polynucleotide"
atggccctccctgtcaccgccctgctgcttccgctggctcttctgctccacgccgctcggcccgaagtgcaattggtggaatcagggggaggacttgtgcagcctggaggatcgctgagactgtcatgtgccgtgtccggctttgccctgtccaaccacgggatgtcctgggtccgccgcgcgcctggaaagggcctcgaatgggtgtcgggtattgtgtacagcggtagcacctactatgccgcatccgtgaaggggagattcaccatcagccgggacaactccaggaacactctgtacctccaaatgaattcgctgaggccagaggacactgccatctactactgctccgcgcatggcggagagtccgacgtctggggacaggggaccaccgtgaccgtgtctagcgcgtccggcggaggcggcagcgggggtcgggcatcagggggcggcggatcggacatccagctcacccagtccccgagctcgctgtccgcctccgtgggagatcgggtcaccatcacgtgccgcgccagccagtcgatttcctcctacctgaactggtaccaacagaagcccggaaaagccccgaagcttctcatctacgccgcctcgagcctgcagtcaggagtgccctcacggttctccggctccggttccggtactgatttcaccctgaccatttcctccctgcaaccggaggacttcgctacttactactgccagcagtcgtactccaccccctacactttcggacaaggcaccaaggtcgaaatcaagaccactaccccagcaccgaggccacccaccccggctcctaccatcgcctcccagcctctgtccctgcgtccggaggcatgtagacccgcagctggtggggccgtgcatacccggggtcttgacttcgcctgcgatatctacatttgggcccctctggctggtacttgcggggtcctgctgctttcactcgtgatcactctttactgtaagcgcggtcggaagaagctgctgtacatctttaagcaacccttcatgaggcctgtgcagactactcaagaggaggacggctgttcatgccggttcccagaggaggaggaaggcggctgcgaactgcgcgtgaaattcagccgcagcgcagatgctccagcctacaagcaggggcagaaccagctctacaacgaactcaatcttggtcggagagaggagtacgacgtgctggacaagcggagaggacgggacccagaaatgggcgggaagccgcgcagaaagaatccccaagagggcctgtacaacgagctccaaaaggataagatggcagaagcctatagcgagattggtatgaaaggggaacgcagaagaggcaaaggccacgacggactgtaccagggactcagcaccgccaccaaggacacctatgacgctcttcacatgcaggccctgccgcctcgg

SEQ ID NO: 973 - protein, 246 aa, Artificial Sequence
  source: /note="Description of Artificial Sequence: Synthetic polypeptide"
QVQLVESGGGLVQPGRSLRLSCAASGFTFSNYAMSWVRQAPGKGLGWVSGISRSGENTYYADSVKGRFTISRDNSKNTLYLQMNSLRDEDTAVYYCARSPAHYYGGMDVWGQGTTVTVSSASGGGGSGGRASGGGGSDIVLTQSPGTLSLSPGERATLSCRASQSISSSFLAWYQQKPGQAPRLLIYGASRRATGIPDRFSGSGSGTDFTLTISRLEPEDSAVYYCQQYHSSPSWTFGQGTKLEIK

SEQ ID NO: 974 - DNA, 738 bp, Artificial Sequence
  source: /note="Description of Artificial Sequence: Synthetic polynucleotide"
caagtgcaactcgtggaatctggtggaggactcgtgcaacccggaagatcgcttagactgtcgtgtgccgccagcgggttcactttctcgaactacgcgatgtcctgggtccgccaggcacccggaaagggactcggttgggtgtccggcatttcccggtccggcgaaaatacctactacgccgactccgtgaagggccgcttcaccatctcaagggacaacagcaaaaacaccctgtacttgcaaatgaactccctgcgggatgaagatacagccgtgtactattgcgcccggtcgcctgcccattactacggcggaatggacgtctggggacagggaaccactgtgactgtcagcagcgcgtcgggtggcggcggctcagggggtcgggcctccggggggggagggtccgacatcgtgctgacccagtccccgggaaccctgagcctgagcccgggagagcgcgcgaccctgtcatgccgggcatcccagagcattagctcctcctttctcgcctggtatcagcagaagcccggacaggccccgaggctgctgatctacggcgctagcagaagggctaccggaatcccagaccggttctccggctccggttccgggaccgatttcacccttactatctcgcgcctggaacctgaggactccgccgtctactactgccagcagtaccactcatccccgtcgtggacgttcggacagggcaccaagctggagattaag

SEQ ID NO: 975 - protein, 120 aa, Artificial Sequence
  source: /note="Description of Artificial Sequence: Synthetic polypeptide"
QVQLVESGGGLVQPGRSLRLSCAASGFTFSNYAMSWVRQAPGKGLGWVSGISRSGENTYYADSVKGRFTISRDNSKNTLYLQMNSLRDEDTAVYYCARSPAHYYGGMDVWGQGTTVTVSS

SEQ ID NO: 976 - protein, 109 aa, Artificial Sequence
  source: /note="Description of Artificial Sequence: Synthetic polypeptide"
DIVLTQSPGTLSLSPGERATLSCRASQSISSSFLAWYQQKPGQAPRLLIYGASRRATGIPDRFSGSGSGTDFTLTISRLEPEDSAVYYCQQYHSSPSWTFGQGTKLEIK

SEQ ID NO: 977 - protein, 490 aa, Artificial Sequence
  source: /note="Description of Artificial Sequence: Synthetic polypeptide"
MALPVTALLLPLALLLHAARPQVQLVESGGGLVQPGRSLRLSCAASGFTFSNYAMSWVRQAPGKGLGWVSGISRSGENTYYADSVKGRFTISRDNSKNTLYLQMNSLRDEDTAVYYCARSPAHYYGGMDVWGQGTTVTVSSASGGGGSGGRASGGGGSDIVLTQSPGTLSLSPGERATLSCRASQSISSSFLAWYQQKPGQAPRLLIYGASRRATGIPDRFSGSGSGTDFTLTISRLEPEDSAVYYCQQYHSSPSWTFGQGTKLEIKTTTPAPRPPTPAPTIASQPLSLRPEACRPAAGGAVHTRGLDFACDIYIWAPLAGTCGVLLLSLVITLYCKRGRKKLLYIFKQPFMRPVQTTQEEDGCSCRFPEEEEGGCELRVKFSRSADAPAYKQGQNQLYNELNLGRREEYDVLDKRRGRDPEMGGKPRRKNPQEGLYNELQKDKMAEAYSEIGMKGERRRGKGHDGLYQGLSTATKDTYDALHMQALPPR

SEQ ID NO: 978 - DNA, 1470 bp, Artificial Sequence
  source: /note="Description of Artificial Sequence: Synthetic polynucleotide"
atggccctccctgtcaccgccctgctgcttccgctggctcttctgctccacgccgctcggccccaagtgcaactcgtggaatctggtggaggactcgtgcaacccggaagatcgcttagactgtcgtgtgccgccagcgggttcactttctcgaactacgcgatgtcctgggtccgccaggcacccggaaagggactcggttgggtgtccggcatttcccggtccggcgaaaatacctactacgccgactccgtgaagggccgcttcaccatctcaagggacaacagcaaaaacaccctgtacttgcaaatgaactccctgcgggatgaagatacagccgtgtactattgcgcccggtcgcctgcccattactacggcggaatggacgtctggggacagggaaccactgtgactgtcagcagcgcgtcgggtggcggcggctcagggggtcgggcctccggggggggagggtccgacatcgtgctgacccagtccccgggaaccctgagcctgagcccgggagagcgcgcgaccctgtcatgccgggcatcccagagcattagctcctcctttctcgcctggtatcagcagaagcccggacaggccccgaggctgctgatctacggcgctagcagaagggctaccggaatcccagaccggttctccggctccggttccgggaccgatttcacccttactatctcgcgcctggaacctgaggactccgccgtctactactgccagcagtaccactcatccccgtcgtggacgttcggacagggcaccaagctggagattaagaccactaccccagcaccgaggccacccaccccggctcctaccatcgcctcccagcctctgtccctgcgtccggaggcatgtagacccgcagctggtggggccgtgcatacccggggtcttgacttcgcctgcgatatctacatttgggcccctctggctggtacttgcggggtcctgctgctttcactcgtgatcactctttactgtaagcgcggtcggaagaagctgctgtacatctttaagcaacccttcatgaggcctgtgcagactactcaagaggaggacggctgttcatgccggttcccagaggaggaggaaggcggctgcgaactgcgcgtgaaattcagccgcagcgcagatgctccagcctacaagcaggggcagaaccagctctacaacgaactcaatcttggtcggagagaggagtacgacgtgctggacaagcggagaggacgggacccagaaatgggcgggaagccgcgcagaaagaatccccaagagggcctgtacaacgagctccaaaaggataagatggcagaagcctatagcgagattggtatgaaaggggaacgcagaagaggcaaaggccacgacggactgtaccagggactcagcaccgccaccaaggacacctatgacgctcttcacatgcaggccctgccgcctcgg

SEQ ID NO: 979 - protein, 244 aa, Artificial Sequence
  source: /note="Description of Artificial Sequence: Synthetic polypeptide"
QVQLVESGGGLVQPGRSLRLSCAASGFTFDDYAMHWVRQAPGKGLEWVSGISWNSGSIGYADSVKGRFTISRDNAKNSLYLQMNSLRAEDTALYYCSVHSFLAYWGQGTLVTVSSASGGGGSGGRASGGGGSDIVMTQTPLSLPVTPGEPASISCRSSQSLLHSNGYNYLDWYLQKPGQSPQLLIYLGSNRASGVPDRFSGSGSGTDFTLKISRVEAEDVGVYYCMQALQTPYTFGQGTKVEIK

SEQ ID NO: 980 - DNA, 732 bp, Artificial Sequence
  source: /note="Description of Artificial Sequence: Synthetic polynucleotide"
caagtgcaactcgtcgaatccggtggaggtctggtccaacctggtagaagcctgagactgtcgtgtgcggccagcggattcacctttgatgactatgctatgcactgggtgcggcaggccccaggaaagggcctggaatgggtgtcgggaattagctggaactccgggtccattggctacgccgactccgtgaagggccgcttcaccatctcccgcgacaacgcaaagaactccctgtacttgcaaatgaactcgctcagggctgaggataccgcgctgtactactgctccgtgcattccttcctggcctactggggacagggaactctggtcaccgtgtcgagcgcctccggcggcgggggctcgggtggacgggcctcgggcggaggggggtccgacatcgtgatgacccagaccccgctgagcttgcccgtgactcccggagagcctgcatccatctcctgccggtcatcccagtcccttctccactccaacggatacaactacctcgactggtacctccagaagccgggacagagccctcagcttctgatctacctggggtcaaatagagcctcaggagtgccggatcggttcagcggatctggttcgggaactgatttcactctgaagatttcccgcgtggaagccgaggacgtgggcgtctactactgtatgcaggcgctgcagaccccctataccttcggccaagggacgaaagtggagatcaag

SEQ ID NO: 981 - protein, 115 aa, Artificial Sequence
  source: /note="Description of Artificial Sequence: Synthetic polypeptide"
QVQLVESGGGLVQPGRSLRLSCAASGFTFDDYAMHWVRQAPGKGLEWVSGISWNSGSIGYADSVKGRFTISRDNAKNSLYLQMNSLRAEDTALYYCSVHSFLAYWGQGTLVTVSS

SEQ ID NO: 982 - protein, 112 aa, Artificial Sequence
  source: /note="Description of Artificial Sequence: Synthetic polypeptide"
DIVMTQTPLSLPVTPGEPASISCRSSQSLLHSNGYNYLDWYLQKPGQSPQLLIYLGSNRASGVPDRFSGSGSGTDFTLKISRVEAEDVGVYYCMQALQTPYTFGQGTKVEIK

SEQ ID NO: 983 - protein, 488 aa, Artificial Sequence
  source: /note="Description of Artificial Sequence: Synthetic polypeptide"
MALPVTALLLPLALLLHAARPQVQLVESGGGLVQPGRSLRLSCAASGFTFDDYAMHWVRQAPGKGLEWVSGISWNSGSIGYADSVKGRFTISRDNAKNSLYLQMNSLRAEDTALYYCSVHSFLAYWGQGTLVTVSSASGGGGSGGRASGGGGSDIVMTQTPLSLPVTPGEPASISCRSSQSLLHSNGYNYLDWYLQKPGQSPQLLIYLGSNRASGVPDRFSGSGSGTDFTLKISRVEAEDVGVYYCMQALQTPYTFGQGTKVEIKTTTPAPRPPTPAPTIASQPLSLRPEACRPAAGGAVHTRGLDFACDIYIWAPLAGTCGVLLLSLVITLYCKRGRKKLLYIFKQPFMRPVQTTQEEDGCSCRFPEEEEGGCELRVKFSRSADAPAYKQGQNQLYNELNLGRREEYDVLDKRRGRDPEMGGKPRRKNPQEGLYNELQKDKMAEAYSEIGMKGERRRGKGHDGLYQGLSTATKDTYDALHMQALPPR

SEQ ID NO: 984 - DNA, 1464 bp, Artificial Sequence
  source: /note="Description of Artificial Sequence: Synthetic polynucleotide"
atggccctccctgtcaccgccctgctgcttccgctggctcttctgctccacgccgctcggccccaagtgcaactcgtcgaatccggtggaggtctggtccaacctggtagaagcctgagactgtcgtgtgcggccagcggattcacctttgatgactatgctatgcactgggtgcggcaggccccaggaaagggcctggaatgggtgtcgggaattagctggaactccgggtccattggctacgccgactccgtgaagggccgcttcaccatctcccgcgacaacgcaaagaactccctgtacttgcaaatgaactcgctcagggctgaggataccgcgctgtactactgctccgtgcattccttcctggcctactggggacagggaactctggtcaccgtgtcgagcgcctccggcggcgggggctcgggtggacgggcctcgggcggaggggggtccgacatcgtgatgacccagaccccgctgagcttgcccgtgactcccggagagcctgcatccatctcctgccggtcatcccagtcccttctccactccaacggatacaactacctcgactggtacctccagaagccgggacagagccctcagcttctgatctacctggggtcaaatagagcctcaggagtgccggatcggttcagcggatctggttcgggaactgatttcactctgaagatttcccgcgtggaagccgaggacgtgggcgtctactactgtatgcaggcgctgcagaccccctataccttcggccaagggacgaaagtggagatcaagaccactaccccagcaccgaggccacccaccccggctcctaccatcgcctcccagcctctgtccctgcgtccggaggcatgtagacccgcagctggtggggccgtgcatacccggggtcttgacttcgcctgcgatatctacatttgggcccctctggctggtacttgcggggtcctgctgctttcactcgtgatcactctttactgtaagcgcggtcggaagaagctgctgtacatctttaagcaacccttcatgaggcctgtgcagactactcaagaggaggacggctgttcatgccggttcccagaggaggaggaaggcggctgcgaactgcgcgtgaaattcagccgcagcgcagatgctccagcctacaagcaggggcagaaccagctctacaacgaactcaatcttggtcggagagaggagtacgacgtgctggacaagcggagaggacgggacccagaaatgggcgggaagccgcgcagaaagaatccccaagagggcctgtacaacgagctccaaaaggataagatggcagaagcctatagcgagattggtatgaaaggggaacgcagaagaggcaaaggccacgacggactgtaccagggactcagcaccgccaccaaggacacctatgacgctcttcacatgcaggccctgccgcctcgg

SEQ ID NO: 985 - protein, 243 aa, Artificial Sequence
  source: /note="Description of Artificial Sequence: Synthetic polypeptide"
EVQLLESGGGLVQPGGSLRLSCAVSGFALSNHGMSWVRRAPGKGLEWVSGIVYSGSTYYAASVKGRFTISRDNSRNTLYLQMNSLRPEDTAIYYCSAHGGESDVWGQGTTVTVSSASGGGGSGGRASGGGGSDIVMTQTPLSLSVTPGQPASISCKSSQSLLRNDGKTPLYWYLQKAGQPPQLLIYEVSNRFSGVPDRFSGSGSGTDFTLKISRVEAEDVGAYYCMQNIQFPSFGGGTKLEIK

SEQ ID NO: 986 - DNA, 729 bp, Artificial Sequence
  source: /note="Description of Artificial Sequence: Synthetic polynucleotide"
gaagtgcaattgttggaatctggaggaggacttgtgcagcctggaggatcactgagactttcgtgtgcggtgtcaggcttcgccctgagcaaccacggcatgagctgggtgcggagagccccggggaagggtctggaatgggtgtccgggatcgtctactccggttcaacttactacgccgcaagcgtgaagggtcgcttcaccatttcccgcgataactcccggaacaccctgtacctccaaatgaactccctgcggcccgaggacaccgccatctactactgttccgcgcatggaggagagtccgatgtctggggacagggcactaccgtgaccgtgtcgagcgcctcggggggaggaggctccggcggtcgcgcctccggggggggtggcagcgacattgtgatgacgcagactccactctcgctgtccgtgaccccgggacagcccgcgtccatctcgtgcaagagctcccagagcctgctgaggaacgacggaaagactcctctgtattggtacctccagaaggctggacagcccccgcaactgctcatctacgaagtgtcaaatcgcttctccggggtgccggatcggttttccggctcgggatcgggcaccgacttcaccctgaaaatctccagggtcgaggccgaggacgtgggagcctactactgcatgcaaaacatccagttcccttccttcggcggcggcacaaagctggagattaag

SEQ ID NO: 987 - protein, 115 aa, Artificial Sequence
  source: /note="Description of Artificial Sequence: Synthetic polypeptide"
EVQLLESGGGLVQPGGSLRLSCAVSGFALSNHGMSWVRRAPGKGLEWVSGIVYSGSTYYAASVKGRFTISRDNSRNTLYLQMNSLRPEDTAIYYCSAHGGESDVWGQGTTVTVSS

SEQ ID NO: 988 - protein, 111 aa, Artificial Sequence
  source: /note="Description of Artificial Sequence: Synthetic polypeptide"
DIVMTQTPLSLSVTPGQPASISCKSSQSLLRNDGKTPLYWYLQKAGQPPQLLIYEVSNRFSGVPDRFSGSGSGTDFTLKISRVEAEDVGAYYCMQNIQFPSFGGGTKLEIK

SEQ ID NO: 989 - protein, 487 aa, Artificial Sequence
  source: /note="Description of Artificial Sequence: Synthetic polypeptide"
MALPVTALLLPLALLLHAARPEVQLLESGGGLVQPGGSLRLSCAVSGFALSNHGMSWVRRAPGKGLEWVSGIVYSGSTYYAASVKGRFTISRDNSRNTLYLQMNSLRPEDTAIYYCSAHGGESDVWGQGTTVTVSSASGGGGSGGRASGGGGSDIVMTQTPLSLSVTPGQPASISCKSSQSLLRNDGKTPLYWYLQKAGQPPQLLIYEVSNRFSGVPDRFSGSGSGTDFTLKISRVEAEDVGAYYCMQNIQFPSFGGGTKLEIKTTTPAPRPPTPAPTIASQPLSLRPEACRPAAGGAVHTRGLDFACDIYIWAPLAGTCGVLLLSLVITLYCKRGRKKLLYIFKQPFMRPVQTTQEEDGCSCRFPEEEEGGCELRVKFSRSADAPAYKQGQNQLYNELNLGRREEYDVLDKRRGRDPEMGGKPRRKNPQEGLYNELQKDKMAEAYSEIGMKGERRRGKGHDGLYQGLSTATKDTYDALHMQALPPR

SEQ ID NO: 990 - DNA, 1461 bp, Artificial Sequence
  source: /note="Description of Artificial Sequence: Synthetic polynucleotide"
atggccctccctgtcaccgccctgctgcttccgctggctcttctgctccacgccgctcggcccgaagtgcaattgttggaatctggaggaggacttgtgcagcctggaggatcactgagactttcgtgtgcggtgtcaggcttcgccctgagcaaccacggcatgagctgggtgcggagagccccggggaagggtctggaatgggtgtccgggatcgtctactccggttcaacttactacgccgcaagcgtgaagggtcgcttcaccatttcccgcgataactcccggaacaccctgtacctccaaatgaactccctgcggcccgaggacaccgccatctactactgttccgcgcatggaggagagtccgatgtctggggacagggcactaccgtgaccgtgtcgagcgcctcggggggaggaggctccggcggtcgcgcctccggggggggtggcagcgacattgtgatgacgcagactccactctcgctgtccgtgaccccgggacagcccgcgtccatctcgtgcaagagctcccagagcctgctgaggaacgacggaaagactcctctgtattggtacctccagaaggctggacagcccccgcaactgctcatctacgaagtgtcaaatcgcttctccggggtgccggatcggttttccggctcgggatcgggcaccgacttcaccctgaaaatctccagggtcgaggccgaggacgtgggagcctactactgcatgcaaaacatccagttcccttccttcggcggcggcacaaagctggagattaagaccactaccccagcaccgaggccacccaccccggctcctaccatcgcctcccagcctctgtccctgcgtccggaggcatgtagacccgcagctggtggggccgtgcatacccggggtcttgacttcgcctgcgatatctacatttgggcccctctggctggtacttgcggggtcctgctgctttcactcgtgatcactctttactgtaagcgcggtcggaagaagctgctgtacatctttaagcaacccttcatgaggcctgtgcagactactcaagaggaggacggctgttcatgccggttcccagaggaggaggaaggcggctgcgaactgcgcgtgaaattcagccgcagcgcagatgctccagcctacaagcaggggcagaaccagctctacaacgaactcaatcttggtcggagagaggagtacgacgtgctggacaagcggagaggacgggacccagaaatgggcgggaagccgcgcagaaagaatccccaagagggcctgtacaacgagctccaaaaggataagatggcagaagcctatagcgagattggtatgaaaggggaacgcagaagaggcaaaggccacgacggactgtaccagggactcagcaccgccaccaaggacacctatgacgctcttcacatgcaggccctgccgcctcgg

SEQ ID NO: 991 - protein, 249 aa, Artificial Sequence
  source: /note="Description of Artificial Sequence: Synthetic polypeptide"
QVQLVQSGAEVRKTGASVKVSCKASGYIFDNFGINWVRQAPGQGLEWMGWINPKNNNTNYAQKFQGRVTITADESTNTAYMEVSSLRSEDTAVYYCARGPYYYQSYMDVWGQGTMVTVSSASGGGGSGGRASGGGGSDIVMTQTPLSLPVTPGEPASISCRSSQSLLHSNGYNYLNWYLQKPGQSPQLLIYLGSKRASGVPDRFSGSGSGTDFTLHITRVGAEDVGVYYCMQALQTPYTFGQGTKLEIK

SEQ ID NO: 992 - DNA, 747 bp, Artificial Sequence
  source: /note="Description of Artificial Sequence: Synthetic polynucleotide"
caagtccaactcgtccagtccggcgcagaagtcagaaaaaccggtgctagcgtgaaagtgtcctgcaaggcctccggctacattttcgataacttcggaatcaactgggtcagacaggccccgggccaggggctggaatggatgggatggatcaaccccaagaacaacaacaccaactacgcacagaagttccagggccgcgtgactatcaccgccgatgaatcgaccaataccgcctacatggaggtgtcctccctgcggtcggaggacactgccgtgtattactgcgcgaggggcccatactactaccaaagctacatggacgtctggggacagggaaccatggtgaccgtgtcatccgcctccggtggtggaggctccggggggcgggcttcaggaggcggaggaagcgatattgtgatgacccagactccgcttagcctgcccgtgactcctggagaaccggcctccatttcctgccggtcctcgcaatcactcctgcattccaacggttacaactacctgaattggtacctccagaagcctggccagtcgccccagttgctgatctatctgggctcgaagcgcgcctccggggtgcctgaccggtttagcggatctgggagcggcacggacttcactctccacatcacccgcgtgggagcggaggacgtgggagtgtactactgtatgcaggcgctgcagactccgtacacattcggacagggcaccaagctggagatcaag

SEQ ID NO: 993 - protein, 120 aa, Artificial Sequence
  source: /note="Description of Artificial Sequence: Synthetic polypeptide"
QVQLVQSGAEVRKTGASVKVSCKASGYIFDNFGINWVRQAPGQGLEWMGWINPKNNNTNYAQKFQGRVTITADESTNTAYMEVSSLRSEDTAVYYCARGPYYYQSYMDVWGQGTMVTVSS

SEQ ID NO: 994 - protein, 112 aa, Artificial Sequence
  source: /note="Description of Artificial Sequence: Synthetic polypeptide"
DIVMTQTPLSLPVTPGEPASISCRSSQSLLHSNGYNYLNWYLQKPGQSPQLLIYLGSKRASGVPDRFSGSGSGTDFTLHITRVGAEDVGVYYCMQALQTPYTFGQGTKLEIK

SEQ ID NO: 995 - protein, 493 aa, Artificial Sequence
  source: /note="Description of Artificial Sequence: Synthetic polypeptide"
MALPVTALLLPLALLLHAARPQVQLVQSGAEVRKTGASVKVSCKASGYIFDNFGINWVRQAPGQGLEWMGWINPKNNNTNYAQKFQGRVTITADESTNTAYMEVSSLRSEDTAVYYCARGPYYYQSYMDVWGQGTMVTVSSASGGGGSGGRASGGGGSDIVMTQTPLSLPVTPGEPASISCRSSQSLLHSNGYNYLNWYLQKPGQSPQLLIYLGSKRASGVPDRFSGSGSGTDFTLHITRVGAEDVGVYYCMQALQTPYTFGQGTKLEIKTTTPAPRPPTPAPTIASQPLSLRPEACRPAAGGAVHTRGLDFACDIYIWAPLAGTCGVLLLSLVITLYCKRGRKKLLYIFKQPFMRPVQTTQEEDGCSCRFPEEEEGGCELRVKFSRSADAPAYKQGQNQLYNELNLGRREEYDVLDKRRGRDPEMGGKPRRKNPQEGLYNELQKDKMAEAYSEIGMKGERRRGKGHDGLYQGLSTATKDTYDALHMQALPPR

SEQ ID NO: 996 - DNA, 1479 bp, Artificial Sequence
  source: /note="Description of Artificial Sequence: Synthetic polynucleotide"
atggccctccctgtcaccgccctgctgcttccgctggctcttctgctccacgccgctcggccccaagtccaactcgtccagtccggcgcagaagtcagaaaaaccggtgctagcgtgaaagtgtcctgcaaggcctccggctacattttcgataacttcggaatcaactgggtcagacaggccccgggccaggggctggaatggatgggatggatcaaccccaagaacaacaacaccaactacgcacagaagttccagggccgcgtgactatcaccgccgatgaatcgaccaataccgcctacatggaggtgtcctccctgcggtcggaggacactgccgtgtattactgcgcgaggggcccatactactaccaaagctacatggacgtctggggacagggaaccatggtgaccgtgtcatccgcctccggtggtggaggctccggggggcgggcttcaggaggcggaggaagcgatattgtgatgacccagactccgcttagcctgcccgtgactcctggagaaccggcctccatttcctgccggtcctcgcaatcactcctgcattccaacggttacaactacctgaattggtacctccagaagcctggccagtcgccccagttgctgatctatctgggctcgaagcgcgcctccggggtgcctgaccggtttagcggatctgggagcggcacggacttcactctccacatcacccgcgtgggagcggaggacgtgggagtgtactactgtatgcaggcgctgcagactccgtacacattcggacagggcaccaagctggagatcaagaccactaccccagcaccgaggccacccaccccggctcctaccatcgcctcccagcctctgtccctgcgtccggaggcatgtagacccgcagctggtggggccgtgcatacccggggtcttgacttcgcctgcgatatctacatttgggcccctctggctggtacttgcggggtcctgctgctttcactcgtgatcactctttactgtaagcgcggtcggaagaagctgctgtacatctttaagcaacccttcatgaggcctgtgcagactactcaagaggaggacggctgttcatgccggttcccagaggaggaggaaggcggctgcgaactgcgcgtgaaattcagccgcagcgcagatgctccagcctacaagcaggggcagaaccagctctacaacgaactcaatcttggtcggagagaggagtacgacgtgctggacaagcggagaggacgggacccagaaatgggcgggaagccgcgcagaaagaatccccaagagggcctgtacaacgagctccaaaaggataagatggcagaagcctatagcgagattggtatgaaaggggaacgcagaagaggcaaaggccacgacggactgtaccagggactcagcaccgccaccaaggacacctatgacgctcttcacatgcaggccctgccgcctcgg

SEQ ID NO: 997 - protein, 246 aa, Artificial Sequence
  source: /note="Description of Artificial Sequence: Synthetic polypeptide"
QVQLQESGGGLVQPGGSLRLSCAASGFTFSSDAMTWVRQAPGKGLEWVSVISGSGGTTYYADSVKGRFTISRDNSKNTLYLQMNSLRAEDTAVYYCAKLDSSGYYYARGPRYWGQGTLVTVSSASGGGGSGGRASGGGGSDIQLTQSPSSLSASVGDRVTITCRASQSISSYLNWYQQKPGKAPKLLIYGASTLASGVPARFSGSGSGTHFTLTINSLQSEDSATYYCQQSYKRASFGQGTKVEIK

SEQ ID NO: 998 - DNA, 738 bp, Artificial Sequence
  source: /note="Description of Artificial Sequence: Synthetic polynucleotide"
caagtgcaacttcaagaatcaggcggaggactcgtgcagcccggaggatcattgcggctctcgtgcgccgcctcgggcttcaccttctcgagcgacgccatgacctgggtccgccaggccccggggaaggggctggaatgggtgtctgtgatttccggctccgggggaactacgtactacgccgattccgtgaaaggtcgcttcactatctcccgggacaacagcaagaacaccctttatctgcaaatgaattccctccgcgccgaggacaccgccgtgtactactgcgccaagctggactcctcgggctactactatgcccggggtccgagatactggggacagggaaccctcgtgaccgtgtcctccgcgtccggcggaggagggtcgggagggcgggcctccggcggcggcggttcggacatccagctgacccagtccccatcctcactgagcgcaagcgtgggcgacagagtcaccattacatgcagggcgtcccagagcatcagctcctacctgaactggtaccaacagaagcctggaaaggctcctaagctgttgatctacggggcttcgaccctggcatccggggtgcccgcgaggtttagcggaagcggtagcggcactcacttcactctgaccattaacagcctccagtccgaggattcagccacttactactgtcagcagtcctacaagcgggccagcttcggacagggcactaaggtcgagatcaag

SEQ ID NO: 999 - protein, 123 aa, Artificial Sequence
  source: /note="Description of Artificial Sequence: Synthetic polypeptide"
QVQLQESGGGLVQPGGSLRLSCAASGFTFSSDAMTWVRQAPGKGLEWVSVISGSGGTTYYADSVKGRFTISRDNSKNTLYLQMNSLRAEDTAVYYCAKLDSSGYYYARGPRYWGQGTLVTVSS

SEQ ID NO: 1000 - protein, 106 aa, Artificial Sequence
  source: /note="Description of Artificial Sequence: Synthetic polypeptide"
DIQLTQSPSSLSASVGDRVTITCRASQSISSYLNWYQQKPGKAPKLLIYGASTLASGVPARFSGSGSGTHFTLTINSLQSEDSATYYCQQSYKRASFGQGTKVEIK

SEQ ID NO: 1001 - protein, 490 aa, Artificial Sequence
  source: /note="Description of Artificial Sequence: Synthetic polypeptide"
MALPVTALLLPLALLLHAARPQVQLQESGGGLVQPGGSLRLSCAASGFTFSSDAMTWVRQAPGKGLEWVSVISGSGGTTYYADSVKGRFTISRDNSKNTLYLQMNSLRAEDTAVYYCAKLDSSGYYYARGPRYWGQGTLVTVSSASGGGGSGGRASGGGGSDIQLTQSPSSLSASVGDRVTITCRASQSISSYLNWYQQKPGKAPKLLIYGASTLASGVPARFSGSGSGTHFTLTINSLQSEDSATYYCQQSYKRASFGQGTKVEIKTTTPAPRPPTPAPTIASQPLSLRPEACRPAAGGAVHTRGLDFACDIYIWAPLAGTCGVLLLSLVITLYCKRGRKKLLYIFKQPFMRPVQTTQEEDGCSCRFPEEEEGGCELRVKFSRSADAPAYKQGQNQLYNELNLGRREEYDVLDKRRGRDPEMGGKPRRKNPQEGLYNELQKDKMAEAYSEIGMKGERRRGKGHDGLYQGLSTATKDTYDALHMQALPPR

SEQ ID NO: 1002 - DNA, 1470 bp, Artificial Sequence
  source: /note="Description of Artificial Sequence: Synthetic polynucleotide"
atggccctccctgtcaccgccctgctgcttccgctggctcttctgctccacgccgctcggccccaagtgcaacttcaagaatcaggcggaggactcgtgcagcccggaggatcattgcggctctcgtgcgccgcctcgggcttcaccttctcgagcgacgccatgacctgggtccgccaggccccggggaaggggctggaatgggtgtctgtgatttccggctccgggggaactacgtactacgccgattccgtgaaaggtcgcttcactatctcccgggacaacagcaagaacaccctttatctgcaaatgaattccctccgcgccgaggacaccgccgtgtactactgcgccaagctggactcctcgggctactactatgcccggggtccgagatactggggacagggaaccctcgtgaccgtgtcctccgcgtccggcggaggagggtcgggagggcgggcctccggcggcggcggttcggacatccagctgacccagtccccatcctcactgagcgcaagcgtgggcgacagagtcaccattacatgcagggcgtcccagagcatcagctcctacctgaactggtaccaacagaagcctggaaaggctcctaagctgttgatctacggggcttcgaccctggcatccggggtgcccgcgaggtttagcggaagcggtagcggcactcacttcactctgaccattaacagcctccagtccgaggattcagccacttactactgtcagcagtcctacaagcgggccagcttcggacagggcactaaggtcgagatcaagaccactaccccagcaccgaggccacccaccccggctcctaccatcgcctcccagcctctgtccctgcgtccggaggcatgtagacccgcagctggtggggccgtgcatacccggggtcttgacttcgcctgcgatatctacatttgggcccctctggctggtacttgcggggtcctgctgctttcactcgtgatcactctttactgtaagcgcggtcggaagaagctgctgtacatctttaagcaacccttcatgaggcctgtgcagactactcaagaggaggacggctgttcatgccggttcccagaggaggaggaaggcggctgcgaactgcgcgtgaaattcagccgcagcgcagatgctccagcctacaagcaggggcagaaccagctctacaacgaactcaatcttggtcggagagaggagtacgacgtgctggacaagcggagaggacgggacccagaaatgggcgggaagccgcgcagaaagaatccccaagagggcctgtacaacgagctccaaaaggataagatggcagaagcctatagcgagattggtatgaaaggggaacgcagaagaggcaaaggccacgacggactgtaccagggactcagcaccgccaccaaggacacctatgacgctcttcacatgcaggccctgccgcctcgg

SEQ ID NO: 1003 - protein, 247 aa, Artificial Sequence
  source: /note="Description of Artificial Sequence: Synthetic polypeptide"
QVQLVQSGAEVKKPGASVKVSCKASGYTFSNYGITWVRQAPGQGLEWMGWISAYNGNTNYAQKFQGRVTMTRNTSISTAYMELSSLRSEDTAVYYCARGPYYYYMDVWGKGTMVTVSSASGGGGSGGRASGGGGSEIVMTQSPLSLPVTPGEPASISCRSSQSLLYSNGYNYVDWYLQKPGQSPQLLIYLGSNRASGVPDRFSGSGSGTDFKLQISRVEAEDVGIYYCMQGRQFPYSFGQGTKVEIK

SEQ ID NO: 1004 - DNA, 741 bp, Artificial Sequence
  source: /note="Description of Artificial Sequence: Synthetic polynucleotide"
caagtccaactggtccagagcggtgcagaagtgaagaagcccggagcgagcgtgaaagtgtcctgcaaggcttccgggtacaccttctccaactacggcatcacttgggtgcgccaggccccgggacagggcctggaatggatggggtggatttccgcgtacaacggcaatacgaactacgctcagaagttccagggtagagtgaccatgactaggaacacctccatttccaccgcctacatggaactgtcctccctgcggagcgaggacaccgccgtgtactattgcgcccggggaccatactactactacatggatgtctgggggaaggggactatggtcaccgtgtcatccgcctcgggaggcggcggatcaggaggacgcgcctctggtggtggaggatcggagatcgtgatgacccagagccctctctccttgcccgtgactcctggggagcccgcatccatttcatgccggagctcccagtcacttctctactccaacggctataactacgtggattggtacctccaaaagccgggccagagcccgcagctgctgatctacctgggctcgaacagggccagcggagtgcctgaccggttctccgggtcgggaagcgggaccgacttcaagctgcaaatctcgagagtggaggccgaggacgtgggaatctactactgtatgcagggccgccagtttccgtactcgttcggacagggcaccaaagtggaaatcaag

SEQ ID NO: 1005 - protein, 118 aa, Artificial Sequence
  source: /note="Description of Artificial Sequence: Synthetic polypeptide"
QVQLVQSGAEVKKPGASVKVSCKASGYTFSNYGITWVRQAPGQGLEWMGWISAYNGNTNYAQKFQGRVTMTRNTSISTAYMELSSLRSEDTAVYYCARGPYYYYMDVWGKGTMVTVSS

SEQ ID NO: 1006 - protein, 112 aa, Artificial Sequence
  source: /note="Description of Artificial Sequence: Synthetic polypeptide"
EIVMTQSPLSLPVTPGEPASISCRSSQSLLYSNGYNYVDWYLQKPGQSPQLLIYLGSNRASGVPDRFSGSGSGTDFKLQISRVEAEDVGIYYCMQGRQFPYSFGQGTKVEIK

SEQ ID NO: 1007 - protein, 491 aa, Artificial Sequence
  source: /note="Description of Artificial Sequence: Synthetic polypeptide"
MALPVTALLLPLALLLHAARPQVQLVQSGAEVKKPGASVKVSCKASGYTFSNYGITWVRQAPGQGLEWMGWISAYNGNTNYAQKFQGRVTMTRNTSISTAYMELSSLRSEDTAVYYCARGPYYYYMDVWGKGTMVTVSSASGGGGSGGRASGGGGSEIVMTQSPLSLPVTPGEPASISCRSSQSLLYSNGYNYVDWYLQKPGQSPQLLIYLGSNRASGVPDRFSGSGSGTDFKLQISRVEAEDVGIYYCMQGRQFPYSFGQGTKVEIKTTTPAPRPPTPAPTIASQPLSLRPEACRPAAGGAVHTRGLDFACDIYIWAPLAGTCGVLLLSLVITLYCKRGRKKLLYIFKQPFMRPVQTTQEEDGCSCRFPEEEEGGCELRVKFSRSADAPAYKQGQNQLYNELNLGRREEYDVLDKRRGRDPEMGGKPRRKNPQEGLYNELQKDKMAEAYSEIGMKGERRRGKGHDGLYQGLSTATKDTYDALHMQALPPR

SEQ ID NO: 1008 - DNA, 1473 bp, Artificial Sequence
  source: /note="Description of Artificial Sequence: Synthetic polynucleotide"
atggccctccctgtcaccgccctgctgcttccgctggctcttctgctccacgccgctcggccccaagtccaactggtccagagcggtgcagaagtgaagaagcccggagcgagcgtgaaagtgtcctgcaaggcttccgggtacaccttctccaactacggcatcacttgggtgcgccaggccccgggacagggcctggaatggatggggtggatttccgcgtacaacggcaatacgaactacgctcagaagttccagggtagagtgaccatgactaggaacacctccatttccaccgcctacatggaactgtcctccctgcggagcgaggacaccgccgtgtactattgcgcccggggaccatactactactacatggatgtctgggggaaggggactatggtcaccgtgtcatccgcctcgggaggcggcggatcaggaggacgcgcctctggtggtggaggatcggagatcgtgatgacccagagccctctctccttgcccgtgactcctggggagcccgcatccatttcatgccggagctcccagtcacttctctactccaacggctataactacgtggattggtacctccaaaagccgggccagagcccgcagctgctgatctacctgggctcgaacagggccagcggagtgcctgaccggttctccgggtcgggaagcgggaccgacttcaagctgcaaatctcgagagtggaggccgaggacgtgggaatctactactgtatgcagggccgccagtttccgtactcgttcggacagggcaccaaagtggaaatcaagaccactaccccagcaccgaggccacccaccccggctcctaccatcgcctcccagcctctgtccctgcgtccggaggcatgtagacccgcagctggtggggccgtgcatacccggggtcttgacttcgcctgcgatatctacatttgggcccctctggctggtacttgcggggtcctgctgctttcactcgtgatcactctttactgtaagcgcggtcggaagaagctgctgtacatctttaagcaacccttcatgaggcctgtgcagactactcaagaggaggacggctgttcatgccggttcccagaggaggaggaaggcggctgcgaactgcgcgtgaaattcagccgcagcgcagatgctccagcctacaagcaggggcagaaccagctctacaacgaactcaatcttggtcggagagaggagtacgacgtgctggacaagcggagaggacgggacccagaaatgggcgggaagccgcgcagaaagaatccccaagagggcctgtacaacgagctccaaaaggataagatggcagaagcctatagcgagattggtatgaaaggggaacgcagaagaggcaaaggccacgacggactgtaccagggactcagcaccgccaccaaggacacctatgacgctcttcacatgcaggccctgccgcctcgg

SEQ ID NO: 1009 - protein, 238 aa, Artificial Sequence
  source: /note="Description of Artificial Sequence: Synthetic polypeptide"
EVQLLETGGGLVQPGGSLRLSCAVSGFALSNHGMSWVRRAPGKGLEWVSGIVYSGSTYYAASVKGRFTISRDNSRNTLYLQMNSLRPEDTAIYYCSAHGGESDVWGQGTTVTVSSASGGGGSGGRASGGGGSEIVLTQSPATLSVSPGESATLSCRASQSVSSNLAWYQQKPGQAPRLLIYGASTRASGIPDRFSGSGSGTDFTLTISSLQAEDVAVYYCQQYGSSLTFGGGTKVEIK

SEQ ID NO: 1010 - DNA, 714 bp, Artificial Sequence
  source: /note="Description of Artificial Sequence: Synthetic polynucleotide"
gaagtgcaattgctcgaaactggaggaggtctggtgcaacctggaggatcacttcgcctgtcctgcgccgtgtcgggctttgccctgtccaaccatggaatgagctgggtccgccgcgcgccggggaagggcctcgaatgggtgtccggcatcgtctactccggctccacctactacgccgcgtccgtgaagggccggttcacgatttcacgggacaactcgcggaacaccctgtacctccaaatgaattcccttcggccggaggatactgccatctactactgctccgcccacggtggcgaatccgacgtctggggccagggaaccaccgtgaccgtgtccagcgcgtccgggggaggaggaagcgggggtagagcatcgggtggaggcggatcagagatcgtgctgacccagtcccccgccaccttgagcgtgtcaccaggagagtccgccaccctgtcatgccgcgccagccagtccgtgtcctccaacctggcttggtaccagcagaagccggggcaggcccctagactcctgatctatggggcgtcgacccgggcatctggaattcccgataggttcagcggatcgggctcgggcactgacttcactctgaccatctcctcgctgcaagccgaggacgtggctgtgtactactgtcagcagtacggaagctccctgactttcggtggcgggaccaaagtcgagattaag

SEQ ID NO: 1011 - protein, 115 aa, Artificial Sequence
  source: /note="Description of Artificial Sequence: Synthetic polypeptide"
EVQLLETGGGLVQPGGSLRLSCAVSGFALSNHGMSWVRRAPGKGLEWVSGIVYSGSTYYAASVKGRFTISRDNSRNTLYLQMNSLRPEDTAIYYCSAHGGESDVWGQGTTVTVSS

SEQ ID NO: 1012 - protein, 106 aa, Artificial Sequence
  source: /note="Description of Artificial Sequence: Synthetic polypeptide"
EIVLTQSPATLSVSPGESATLSCRASQSVSSNLAWYQQKPGQAPRLLIYGASTRASGIPDRFSGSGSGTDFTLTISSLQAEDVAVYYCQQYGSSLTFGGGTKVEIK

SEQ ID NO: 1013 - protein, 482 aa, Artificial Sequence
  source: /note="Description of Artificial Sequence: Synthetic polypeptide"
MALPVTALLLPLALLLHAARPEVQLLETGGGLVQPGGSLRLSCAVSGFALSNHGMSWVRRAPGKGLEWVSGIVYSGSTYYAASVKGRFTISRDNSRNTLYLQMNSLRPEDTAIYYCSAHGGESDVWGQGTTVTVSSASGGGGSGGRASGGGGSEIVLTQSPATLSVSPGESATLSCRASQSVSSNLAWYQQKPGQAPRLLIYGASTRASGIPDRFSGSGSGTDFTLTISSLQAEDVAVYYCQQYGSSLTFGGGTKVEIKTTTPAPRPPTPAPTIASQPLSLRPEACRPAAGGAVHTRGLDFACDIYIWAPLAGTCGVLLLSLVITLYCKRGRKKLLYIFKQPFMRPVQTTQEEDGCSCRFPEEEEGGCELRVKFSRSADAPAYKQGQNQLYNELNLGRREEYDVLDKRRGRDPEMGGKPRRKNPQEGLYNELQKDKMAEAYSEIGMKGERRRGKGHDGLYQGLSTATKDTYDALHMQALPPR

SEQ ID NO: 1014 - DNA, 1446 bp, Artificial Sequence
  source: /note="Description of Artificial Sequence: Synthetic polynucleotide"
atggccctccctgtcaccgccctgctgcttccgctggctcttctgctccacgccgctcggcccgaagtgcaattgctcgaaactggaggaggtctggtgcaacctggaggatcacttcgcctgtcctgcgccgtgtcgggctttgccctgtccaaccatggaatgagctgggtccgccgcgcgccggggaagggcctcgaatgggtgtccggcatcgtctactccggctccacctactacgccgcgtccgtgaagggccggttcacgatttcacgggacaactcgcggaacaccctgtacctccaaatgaattcccttcggccggaggatactgccatctactactgctccgcccacggtggcgaatccgacgtctggggccagggaaccaccgtgaccgtgtccagcgcgtccgggggaggaggaagcgggggtagagcatcgggtggaggcggatcagagatcgtgctgacccagtcccccgccaccttgagcgtgtcaccaggagagtccgccaccctgtcatgccgcgccagccagtccgtgtcctccaacctggcttggtaccagcagaagccggggcaggcccctagactcctgatctatggggcgtcgacccgggcatctggaattcccgataggttcagcggatcgggctcgggcactgacttcactctgaccatctcctcgctgcaagccgaggacgtggctgtgtactactgtcagcagtacggaagctccctgactttcggtggcgggaccaaagtcgagattaagaccactaccccagcaccgaggccacccaccccggctcctaccatcgcctcccagcctctgtccctgcgtccggaggcatgtagacccgcagctggtggggccgtgcatacccggggtcttgacttcgcctgcgatatctacatttgggcccctctggctggtacttgcggggtcctgctgctttcactcgtgatcactctttactgtaagcgcggtcggaagaagctgctgtacatctttaagcaacccttcatgaggcctgtgcagactactcaagaggaggacggctgttcatgccggttcccagaggaggaggaaggcggctgcgaactgcgcgtgaaattcagccgcagcgcagatgctccagcctacaagcaggggcagaaccagctctacaacgaactcaatcttggtcggagagaggagtacgacgtgctggacaagcggagaggacgggacccagaaatgggcgggaagccgcgcagaaagaatccccaagagggcctgtacaacgagctccaaaaggataagatggcagaagcctatagcgagattggtatgaaaggggaacgcagaagaggcaaaggccacgacggactgtaccagggactcagcaccgccaccaaggacacctatgacgctcttcacatgcaggccctgccgcctcgg

SEQ ID NO: 1015 - protein, 239 aa, Artificial Sequence
  source: /note="Description of Artificial Sequence: Synthetic polypeptide"
EVQLVETGGGLVQPGGSLRLSCAVSGFALSNHGMSWVRRAPGKGLEWVSGIVYSGSTYYAASVKGRFTISRDNSRNTLYLQMNSLRPEDTAIYYCSAHGGESDVWGQGTTVTVSSASGGGGSGGRASGGGGSEIVMTQSPATLSVSPGERATLSCRASQSVSSKLAWYQQKPGQAPRLLMYGASIRATGIPDRFSGSGSGTEFTLTISSLEPEDFAVYYCQQYGSSSWTFGQGTKVEIK

SEQ ID NO: 1016 - DNA, 717 bp, Artificial Sequence
  source: /note="Description of Artificial Sequence: Synthetic polynucleotide"
gaagtgcaattggtggaaactggaggaggacttgtgcaacctggaggatcattgagactgagctgcgcagtgtcgggattcgccctgagcaaccatggaatgtcctgggtcagaagggcccctggaaaaggcctcgaatgggtgtcagggatcgtgtactccggttccacttactacgccgcctccgtgaaggggcgcttcactatctcacgggataactcccgcaataccctgtacctccaaatgaacagcctgcggccggaggataccgccatctactactgttccgcccacggtggagagtctgacgtctggggccagggaactaccgtgaccgtgtcctccgcgtccggcggtggagggagcggcggccgcgccagcggcggcggaggctccgagatcgtgatgacccagagccccgctactctgtcggtgtcgcccggagaaagggcgaccctgtcctgccgggcgtcgcagtccgtgagcagcaagctggcttggtaccagcagaagccgggccaggcaccacgcctgcttatgtacggtgcctccattcgggccaccggaatcccggaccggttctcggggtcggggtccggtaccgagttcacactgaccatttcctcgctcgagcccgaggactttgccgtctattactgccagcagtacggctcctcctcatggacgttcggccaggggaccaaggtcgaaatcaag

SEQ ID NO: 1017 - protein, 115 aa, Artificial Sequence
  source: /note="Description of Artificial Sequence: Synthetic polypeptide"
EVQLVETGGGLVQPGGSLRLSCAVSGFALSNHGMSWVRRAPGKGLEWVSGIVYSGSTYYAASVKGRFTISRDNSRNTLYLQMNSLRPEDTAIYYCSAHGGESDVWGQGTTVTVSS

SEQ ID NO: 1018 - protein, 107 aa, Artificial Sequence
  source: /note="Description of Artificial Sequence: Synthetic polypeptide"
EIVMTQSPATLSVSPGERATLSCRASQSVSSKLAWYQQKPGQAPRLLMYGASIRATGIPDRFSGSGSGTEFTLTISSLEPEDFAVYYCQQYGSSSWTFGQGTKVEIK

SEQ ID NO: 1019 - protein, 483 aa, Artificial Sequence
  source: /note="Description of Artificial Sequence: Synthetic polypeptide"
MALPVTALLLPLALLLHAARPEVQLVETGGGLVQPGGSLRLSCAVSGFALSNHGMSWVRRAPGKGLEWVSGIVYSGSTYYAASVKGRFTISRDNSRNTLYLQMNSLRPEDTAIYYCSAHGGESDVWGQGTTVTVSSASGGGGSGGRASGGGGSEIVMTQSPATLSVSPGERATLSCRASQSVSSKLAWYQQKPGQAPRLLMYGASIRATGIPDRFSGSGSGTEFTLTISSLEPEDFAVYYCQQYGSSSWTFGQGTKVEIKTTTPAPRPPTPAPTIASQPLSLRPEACRPAAGGAVHTRGLDFACDIYIWAPLAGTCGVLLLSLVITLYCKRGRKKLLYIFKQPFMRPVQTTQEEDGCSCRFPEEEEGGCELRVKFSRSADAPAYKQGQNQLYNELNLGRREEYDVLDKRRGRDPEMGGKPRRKNPQEGLYNELQKDKMAEAYSEIGMKGERRRGKGHDGLYQGLSTATKDTYDALHMQALPPR

SEQ ID NO: 1020 - DNA, 1449 bp, Artificial Sequence
  source: /note="Description of Artificial Sequence: Synthetic polynucleotide"
atggccctccctgtcaccgccctgctgcttccgctggctcttctgctccacgccgctcggcccgaagtgcaattggtggaaactggaggaggacttgtgcaacctggaggatcattgagactgagctgcgcagtgtcgggattcgccctgagcaaccatggaatgtcctgggtcagaagggcccctggaaaaggcctcgaatgggtgtcagggatcgtgtactccggttccacttactacgccgcctccgtgaaggggcgcttcactatctcacgggataactcccgcaataccctgtacctccaaatgaacagcctgcggccggaggataccgccatctactactgttccgcccacggtggagagtctgacgtctggggccagggaactaccgtgaccgtgtcctccgcgtccggcggtggagggagcggcggccgcgccagcggcggcggaggctccgagatcgtgatgacccagagccccgctactctgtcggtgtcgcccggagaaagggcgaccctgtcctgccgggcgtcgcagtccgtgagcagcaagctggcttggtaccagcagaagccgggccaggcaccacgcctgcttatgtacggtgcctccattcgggccaccggaatcccggaccggttctcggggtcggggtccggtaccgagttcacactgaccatttcctcgctcgagcccgaggactttgccgtctattactgccagcagtacggctcctcctcatggacgttcggccaggggaccaaggtcgaaatcaagaccactaccccagcaccgaggccacccaccccggctcctaccatcgcctcccagcctctgtccctgcgtccggaggcatgtagacccgcagctggtggggccgtgcatacccggggtcttgacttcgcctgcgatatctacatttgggcccctctggctggtacttgcggggtcctgctgctttcactcgtgatcactctttactgtaagcgcggtcggaagaagctgctgtacatctttaagcaacccttcatgaggcctgtgcagactactcaagaggaggacggctgttcatgccggttcccagaggaggaggaaggcggctgcgaactgcgcgtgaaattcagccgcagcgcagatgctccagcctacaagcaggggcagaaccagctctacaacgaactcaatcttggtcggagagaggagtacgacgtgctggacaagcggagaggacgggacccagaaatgggcgggaagccgcgcagaaagaatccccaagagggcctgtacaacgagctccaaaaggataagatggcagaagcctatagcgagattggtatgaaaggggaacgcagaagaggcaaaggccacgacggactgtaccagggactcagcaccgccaccaaggacacctatgacgctcttcacatgcaggccctgccgcctcgg

SEQ ID NO: 1021 - protein, 241 aa, Artificial Sequence
  source: /note="Description of Artificial Sequence: Synthetic polypeptide"
EVQLVETGGGVVQPGGSLRLSCAVSGFALSNHGMSWVRRAPGKGLEWVSGIVYSGSTYYAASVKGRFTISRDNSRNTLYLQMNSLRPEDTAIYYCSAHGGESDVWGQGTTVTVSSASGGGGSGGRASGGGGSEIVLTQSPGTLSLSPGERATLSCRASQSVGSTNLAWYQQKPGQAPRLLIYDASNRATGIPDRFSGGGSGTDFTLTISRLEPEDFAVYYCQQYGSSPPWTFGQGTKVEIK

SEQ ID NO: 1022 - DNA, 723 bp, Artificial Sequence
  source: /note="Description of Artificial Sequence: Synthetic polynucleotide"
gaagtgcaattggtggagactggaggaggagtggtgcaacctggaggaagcctgagactgtcatgcgcggtgtcgggcttcgccctctccaaccacggaatgtcctgggtccgccgggcccctgggaaaggacttgaatgggtgtccggcatcgtgtactcgggttccacctactacgcggcctcagtgaagggccggtttactattagccgcgacaactccagaaacacactgtacctccaaatgaactcgctgcggccggaagataccgctatctactactgctccgcccatgggggagagtcggacgtctggggacagggcaccactgtcactgtgtccagcgcttccggcggtggtggaagcgggggacgggcctcaggaggcggtggcagcgagattgtgctgacccagtcccccgggaccctgagcctgtccccgggagaaagggccaccctctcctgtcgggcatcccagtccgtggggtctactaaccttgcatggtaccagcagaagcccggccaggcccctcgcctgctgatctacgacgcgtccaatagagccaccggcatcccggatcgcttcagcggaggcggatcgggcaccgacttcaccctcaccatttcaaggctggaaccggaggacttcgccgtgtactactgccagcagtatggttcgtccccaccctggacgttcggccaggggactaaggtcgagatcaag

SEQ ID NO: 1023 - protein, 115 aa, Artificial Sequence
  source: /note="Description of Artificial Sequence: Synthetic polypeptide"
EVQLVETGGGVVQPGGSLRLSCAVSGFALSNHGMSWVRRAPGKGLEWVSGIVYSGSTYYAASVKGRFTISRDNSRNTLYLQMNSLRPEDTAIYYCSAHGGESDVWGQGTTVTVSS

SEQ ID NO: 1024 - protein, 109 aa, Artificial Sequence
  source: /note="Description of Artificial Sequence: Synthetic polypeptide"
EIVLTQSPGTLSLSPGERATLSCRASQSVGSTNLAWYQQKPGQAPRLLIYDASNRATGIPDRFSGGGSGTDFTLTISRLEPEDFAVYYCQQYGSSPPWTFGQGTKVEIK

SEQ ID NO: 1025 - protein, 485 aa, Artificial Sequence
  source: /note="Description of Artificial Sequence: Synthetic polypeptide"
MALPVTALLLPLALLLHAARPEVQLVETGGGVVQPGGSLRLSCAVSGFALSNHGMSWVRRAPGKGLEWVSGIVYSGSTYYAASVKGRFTISRDNSRNTLYLQMNSLRPEDTAIYYCSAHGGESDVWGQGTTVTVSSASGGGGSGGRASGGGGSEIVLTQSPGTLSLSPGERATLSCRASQSVGSTNLAWYQQKPGQAPRLLIYDASNRATGIPDRFSGGGSGTDFTLTISRLEPEDFAVYYCQQYGSSPPWTFGQGTKVEIKTTTPAPRPPTPAPTIASQPLSLRPEACRPAAGGAVHTRGLDFACDIYIWAPLAGTCGVLLLSLVITLYCKRGRKKLLYIFKQPFMRPVQTTQEEDGCSCRFPEEEEGGCELRVKFSRSADAPAYKQGQNQLYNELNLGRREEYDVLDKRRGRDPEMGGKPRRKNPQEGLYNELQKDKMAEAYSEIGMKGERRRGKGHDGLYQGLSTATKDTYDALHMQALPPR

SEQ ID NO: 1026 - DNA, 1455 bp, Artificial Sequence
  source: /note="Description of Artificial Sequence: Synthetic polynucleotide"
atggccctccctgtcaccgccctgctgcttccgctggctcttctgctccacgccgctcggcccgaagtgcaattggtggagactggaggaggagtggtgcaacctggaggaagcctgagactgtcatgcgcggtgtcgggcttcgccctctccaaccacggaatgtcctgggtccgccgggcccctgggaaaggacttgaatgggtgtccggcatcgtgtactcgggttccacctactacgcggcctcagtgaagggccggtttactattagccgcgacaactccagaaacacactgtacctccaaatgaactcgctgcggccggaagataccgctatctactactgctccgcccatgggggagagtcggacgtctggggacagggcaccactgtcactgtgtccagcgcttccggcggtggtggaagcgggggacgggcctcaggaggcggtggcagcgagattgtgctgacccagtcccccgggaccctgagcctgtccccgggagaaagggccaccctctcctgtcgggcatcccagtccgtggggtctactaaccttgcatggtaccagcagaagcccggccaggcccctcgcctgctgatctacgacgcgtccaatagagccaccggcatcccggatcgcttcagcggaggcggatcgggcaccgacttcaccctcaccatttcaaggctggaaccggaggacttcgccgtgtactactgccagcagtatggttcgtccccaccctggacgttcggccaggggactaaggtcgagatcaagaccactaccccagcaccgaggccacccaccccggctcctaccatcgcctcccagcctctgtccctgcgtccggaggcatgtagacccgcagctggtggggccgtgcatacccggggtcttgacttcgcctgcgatatctacatttgggcccctctggctggtacttgcggggtcctgctgctttcactcgtgatcactctttactgtaagcgcggtcggaagaagctgctgtacatctttaagcaacccttcatgaggcctgtgcagactactcaagaggaggacggctgttcatgccggttcccagaggaggaggaaggcggctgcgaactgcgcgtgaaattcagccgcagcgcagatgctccagcctacaagcaggggcagaaccagctctacaacgaactcaatcttggtcggagagaggagtacgacgtgctggacaagcggagaggacgggacccagaaatgggcgggaagccgcgcagaaagaatccccaagagggcctgtacaacgagctccaaaaggataagatggcagaagcctatagcgagattggtatgaaaggggaacgcagaagaggcaaaggccacgacggactgtaccagggactcagcaccgccaccaaggacacctatgacgctcttcacatgcaggccctgccgcctcgg

SEQ ID NO: 1027 - protein, 239 aa, Artificial Sequence
  source: /note="Description of Artificial Sequence: Synthetic polypeptide"
QVQLVESGGGLVKPGGSLRLSCAASGFTFSDYYMSWIRQAPGKGLEWVSYISSSGSTIYYADSVKGRFTISRDNAKNSLYLQMNSLRAEDTAVYYCARESGDGMDVWGQGTTVTVSSASGGGGSGGRASGGGGSDIQMTQSPSSLSASVGDRVTITCRASQSISSYLNWYQQKPGKAPKLLIYAASSLQSGVPSRFSGSGSGTDFTLTISSLQPEDFATYYCQQSYTLAFGQGTKVDIK

SEQ ID NO: 1028 - DNA, 717 bp, Artificial Sequence
  source: /note="Description of Artificial Sequence: Synthetic polynucleotide"
caagtgcaactcgtggaatctggtggaggactcgtgaaacctggaggatcattgagactgtcatgcgcggcctcgggattcacgttctccgattactacatgagctggattcgccaggctccggggaagggactggaatgggtgtcctacatttcctcatccggctccaccatctactacgcggactccgtgaaggggagattcaccattagccgcgataacgccaagaacagcctgtaccttcagatgaactccctgcgggctgaagatactgccgtctactactgcgcaagggagagcggagatgggatggacgtctggggacagggtaccactgtgaccgtgtcgtcggcctccggcggagggggttcgggtggaagggccagcggcggcggaggcagcgacatccagatgacccagtccccctcatcgctgtccgcctccgtgggcgaccgcgtcaccatcacatgccgggcctcacagtcgatctcctcctacctcaattggtatcagcagaagcccggaaaggcccctaagcttctgatctacgcagcgtcctccctgcaatccggggtcccatctcggttctccggctcgggcagcggtaccgacttcactctgaccatctcgagcctgcagccggaggacttcgccacttactactgtcagcaaagctacaccctcgcgtttggccagggcaccaaagtggacatcaag

SEQ ID NO: 1029 - protein, 117 aa, Artificial Sequence
  source: /note="Description of Artificial Sequence: Synthetic polypeptide"
QVQLVESGGGLVKPGGSLRLSCAASGFTFSDYYMSWIRQAPGKGLEWVSYISSSGSTIYYADSVKGRFTISRDNAKNSLYLQMNSLRAEDTAVYYCARESGDGMDVWGQGTTVTVSS

SEQ ID NO: 1030 - protein, 105 aa, Artificial Sequence
  source: /note="Description of Artificial Sequence: Synthetic polypeptide"
DIQMTQSPSSLSASVGDRVTITCRASQSISSYLNWYQQKPGKAPKLLIYAASSLQSGVPSRFSGSGSGTDFTLTISSLQPEDFATYYCQQSYTLAFGQGTKVDIK

SEQ ID NO: 1031 - protein, 483 aa, Artificial Sequence
  source: /note="Description of Artificial Sequence: Synthetic polypeptide"
MALPVTALLLPLALLLHAARPQVQLVESGGGLVKPGGSLRLSCAASGFTFSDYYMSWIRQAPGKGLEWVSYISSSGSTIYYADSVKGRFTISRDNAKNSLYLQMNSLRAEDTAVYYCARESGDGMDVWGQGTTVTVSSASGGGGSGGRASGGGGSDIQMTQSPSSLSASVGDRVTITCRASQSISSYLNWYQQKPGKAPKLLIYAASSLQSGVPSRFSGSGSGTDFTLTISSLQPEDFATYYCQQSYTLAFGQGTKVDIKTTTPAPRPPTPAPTIASQPLSLRPEACRPAAGGAVHTRGLDFACDIYIWAPLAGTCGVLLLSLVITLYCKRGRKKLLYIFKQPFMRPVQTTQEEDGCSCRFPEEEEGGCELRVKFSRSADAPAYKQGQNQLYNELNLGRREEYDVLDKRRGRDPEMGGKPRRKNPQEGLYNELQKDKMAEAYSEIGMKGERRRGKGHDGLYQGLSTATKDTYDALHMQALPPR

SEQ ID NO: 1032 - DNA, 1449 bp, Artificial Sequence
  source: /note="Description of Artificial Sequence: Synthetic polynucleotide"
atggccctccctgtcaccgccctgctgcttccgctggctcttctgctccacgccgctcggccccaagtgcaactcgtggaatctggtggaggactcgtgaaacctggaggatcattgagactgtcatgcgcggcctcgggattcacgttctccgattactacatgagctggattcgccaggctccggggaagggactggaatgggtgtcctacatttcctcatccggctccaccatctactacgcggactccgtgaaggggagattcaccattagccgcgataacgccaagaacagcctgtaccttcagatgaactccctgcgggctgaagatactgccgtctactactgcgcaagggagagcggagatgggatggacgtctggggacagggtaccactgtgaccgtgtcgtcggcctccggcggagggggttcgggtggaagggccagcggcggcggaggcagcgacatccagatgacccagtccccctcatcgctgtccgcctccgtgggcgaccgcgtcaccatcacatgccgggcctcacagtcgatctcctcctacctcaattggtatcagcagaagcccggaaaggcccctaagcttctgatctacgcagcgtcctccctgcaatccggggtcccatctcggttctccggctcgggcagcggtaccgacttcactctgaccatctcgagcctgcagccggaggacttcgccacttactactgtcagcaaagctacaccctcgcgtttggccagggcaccaaagtggacatcaagaccactaccccagcaccgaggccacccaccccggctcctaccatcgcctcccagcctctgtccctgcgtccggaggcatgtagacccgcagctggtggggccgtgcatacccggggtcttgacttcgcctgcgatatctacatttgggcccctctggctggtacttgcggggtcctgctgctttcactcgtgatcactctttactgtaagcgcggtcggaagaagctgctgtacatctttaagcaacccttcatgaggcctgtgcagactactcaagaggaggacggctgttcatgccggttcccagaggaggaggaaggcggctgcgaactgcgcgtgaaattcagccgcagcgcagatgctccagcctacaagcaggggcagaaccagctctacaacgaactcaatcttggtcggagagaggagtacgacgtgctggacaagcggagaggacgggacccagaaatgggcgggaagccgcgcagaaagaatccccaagagggcctgtacaacgagctccaaaaggataagatggcagaagcctatagcgagattggtatgaaaggggaacgcagaagaggcaaaggccacgacggactgtaccagggactcagcaccgccaccaaggacacctatgacgctcttcacatgcaggccctgccgcctcgg

SEQ ID NO: 1033 - protein, 246 aa, Artificial Sequence
  source: /note="Description of Artificial Sequence: Synthetic polypeptide"
QVQLVQSGGGLVKPGGSLRLSCAASGFTFSDYYMSWIRQAPGKGLEWVSYISSSGNTIYYADSVKGRFTISRDNAKNSLYLQMNSLRAEDTAVYYCARSTMVREDYWGQGTLVTVSSASGGGGSGGRASGGGGSDIVLTQSPLSLPVTLGQPASISCKSSESLVHNSGKTYLNWFHQRPGQSPRRLIYEVSNRDSGVPDRFTGSGSGTDFTLKISRVEAEDVGVYYCMQGTHWPGTFGQGTKLEIK

SEQ ID NO: 1034 - DNA, 738 bp, Artificial Sequence
  source: /note="Description of Artificial Sequence: Synthetic polynucleotide"
caagtgcaactggtgcaaagcggaggaggattggtcaaacccggaggaagcctgagactgtcatgcgcggcctctggattcaccttctccgattactacatgtcatggatcagacaggccccggggaagggcctcgaatgggtgtcctacatctcgtcctccgggaacaccatctactacgccgacagcgtgaagggccgctttaccatttcccgcgacaacgcaaagaactcgctgtaccttcagatgaattccctgcgggctgaagataccgcggtgtactattgcgcccggtccactatggtccgggaggactactggggacagggcacactcgtgaccgtgtccagcgcgagcgggggtggaggcagcggtggacgcgcctccggcggcggcggttcagacatcgtgctgactcagtcgcccctgtcgctgccggtcaccctgggccaaccggcctcaattagctgcaagtcctcggagagcctggtgcacaactcaggaaagacttacctgaactggttccatcagcggcctggacagtccccacggaggctcatctatgaagtgtccaacagggattcgggggtgcccgaccgcttcactggctccgggtccggcaccgacttcaccttgaaaatctccagagtggaagccgaggacgtgggcgtgtactactgtatgcagggtacccactggcctggaacctttggacaaggaactaagctcgagattaag

SEQ ID NO: 1035 - protein, 117 aa, Artificial Sequence
  source: /note="Description of Artificial Sequence: Synthetic polypeptide"
QVQLVQSGGGLVKPGGSLRLSCAASGFTFSDYYMSWIRQAPGKGLEWVSYISSSGNTIYYADSVKGRFTISRDNAKNSLYLQMNSLRAEDTAVYYCARSTMVREDYWGQGTLVTVSS

SEQ ID NO: 1036 - protein, 112 aa, Artificial Sequence
  source: /note="Description of Artificial Sequence: Synthetic polypeptide"
DIVLTQSPLSLPVTLGQPASISCKSSESLVHNSGKTYLNWFHQRPGQSPRRLIYEVSNRDSGVPDRFTGSGSGTDFTLKISRVEAEDVGVYYCMQGTHWPGTFGQGTKLEIK

SEQ ID NO: 1037 - protein, 490 aa, Artificial Sequence
  source: /note="Description of Artificial Sequence: Synthetic polypeptide"
MALPVTALLLPLALLLHAARPQVQLVQSGGGLVKPGGSLRLSCAASGFTFSDYYMSWIRQAPGKGLEWVSYISSSGNTIYYADSVKGRFTISRDNAKNSLYLQMNSLRAEDTAVYYCARSTMVREDYWGQGTLVTVSSASGGGGSGGRASGGGGSDIVLTQSPLSLPVTLGQPASISCKSSESLVHNSGKTYLNWFHQRPGQSPRRLIYEVSNRDSGVPDRFTGSGSGTDFTLKISRVEAEDVGVYYCMQGTHWPGTFGQGTKLEIKTTTPAPRPPTPAPTIASQPLSLRPEACRPAAGGAVHTRGLDFACDIYIWAPLAGTCGVLLLSLVITLYCKRGRKKLLYIFKQPFMRPVQTTQEEDGCSCRFPEEEEGGCELRVKFSRSADAPAYKQGQNQLYNELNLGRREEYDVLDKRRGRDPEMGGKPRRKNPQEGLYNELQKDKMAEAYSEIGMKGERRRGKGHDGLYQGLSTATKDTYDALHMQALPPR

SEQ ID NO: 1038 - DNA, 1470 bp, Artificial Sequence
  source: /note="Description of Artificial Sequence: Synthetic polynucleotide"
atggccctccctgtcaccgccctgctgcttccgctggctcttctgctccacgccgctcggccccaagtgcaactggtgcaaagcggaggaggattggtcaaacccggaggaagcctgagactgtcatgcgcggcctctggattcaccttctccgattactacatgtcatggatcagacaggccccggggaagggcctcgaatgggtgtcctacatctcgtcctccgggaacaccatctactacgccgacagcgtgaagggccgctttaccatttcccgcgacaacgcaaagaactcgctgtaccttcagatgaattccctgcgggctgaagataccgcggtgtactattgcgcccggtccactatggtccgggaggactactggggacagggcacactcgtgaccgtgtccagcgcgagcgggggtggaggcagcggtggacgcgcctccggcggcggcggttcagacatcgtgctgactcagtcgcccctgtcgctgccggtcaccctgggccaaccggcctcaattagctgcaagtcctcggagagcctggtgcacaactcaggaaagacttacctgaactggttccatcagcggcctggacagtccccacggaggctcatctatgaagtgtccaacagggattcgggggtgcccgaccgcttcactggctccgggtccggcaccgacttcaccttgaaaatctccagagtggaagccgaggacgtgggcgtgtactactgtatgcagggtacccactggcctggaacctttggacaaggaactaagctcgagattaagaccactaccccagcaccgaggccacccaccccggctcctaccatcgcctcccagcctctgtccctgcgtccggaggcatgtagacccgcagctggtggggccgtgcatacccggggtcttgacttcgcctgcgatatctacatttgggcccctctggctggtacttgcggggtcctgctgctttcactcgtgatcactctttactgtaagcgcggtcggaagaagctgctgtacatctttaagcaacccttcatgaggcctgtgcagactactcaagaggaggacggctgttcatgccggttcccagaggaggaggaaggcggctgcgaactgcgcgtgaaattcagccgcagcgcagatgctccagcctacaagcaggggcagaaccagctctacaacgaactcaatcttggtcggagagaggagtacgacgtgctggacaagcggagaggacgggacccagaaatgggcgggaagccgcgcagaaagaatccccaagagggcctgtacaacgagctccaaaaggataagatggcagaagcctatagcgagattggtatgaaaggggaacgcagaagaggcaaaggccacgacggactgtaccagggactcagcaccgccaccaaggacacctatgacgctcttcacatgcaggccctgccgcctcgg

SEQ ID NO: 1039 - protein, 239 aa, Artificial Sequence
  source: /note="Description of Artificial Sequence: Synthetic polypeptide"
QVQLVESGGGLVQPGGSLRLSCAVSGFALSNHGMSWVRRAPGKGLEWVSGIVYSGSTYYAASVKGRFTISRDNSRNTLYLQMNSLRPEDTAIYYCSAHGGESDVWGQGTTVTVSSASGGGGSGGRASGGGGSDIRLTQSPSPLSASVGDRVTITCQASEDINKFLNWYHQTPGKAPKLLIYDASTLQTGVPSRFSGSGSGTDFTLTINSLQPEDIGTYYCQQYESLPLTFGGGTKVEIK

SEQ ID NO: 1040 - DNA, 717 bp, Artificial Sequence
  source: /note="Description of Artificial Sequence: Synthetic polynucleotide"
caagtgcaactcgtggaatctggtggaggactcgtgcaacccggtggaagccttaggctgtcgtgcgccgtcagcgggtttgctctgagcaaccatggaatgtcctgggtccgccgggcaccgggaaaagggctggaatgggtgtccggcatcgtgtacagcgggtcaacctattacgccgcgtccgtgaagggcagattcactatctcaagagacaacagccggaacaccctgtacttgcaaatgaattccctgcgccccgaggacaccgccatctactactgctccgcccacggaggagagtcggacgtgtggggccagggaacgactgtgactgtgtccagcgcatcaggagggggtggttcgggcggccgggcctcggggggaggaggttccgacattcggctgacccagtccccgtccccactgtcggcctccgtcggcgaccgcgtgaccatcacttgtcaggcgtccgaggacattaacaagttcctgaactggtaccaccagacccctggaaaggcccccaagctgctgatctacgatgcctcgacccttcaaactggagtgcctagccggttctccgggtccggctccggcactgatttcactctgaccatcaactcattgcagccggaagatatcgggacctactattgccagcagtacgaatccctcccgctcacattcggcgggggaaccaaggtcgagattaag

SEQ ID NO: 1041 - protein, 115 aa, Artificial Sequence
  source: /note="Description of Artificial Sequence: Synthetic polypeptide"
QVQLVESGGGLVQPGGSLRLSCAVSGFALSNHGMSWVRRAPGKGLEWVSGIVYSGSTYYAASVKGRFTISRDNSRNTLYLQMNSLRPEDTAIYYCSAHGGESDVWGQGTTVTVSS

SEQ ID NO: 1042 - protein, 107 aa, Artificial Sequence
  source: /note="Description of Artificial Sequence: Synthetic polypeptide"
DIRLTQSPSPLSASVGDRVTITCQASEDINKFLNWYHQTPGKAPKLLIYDASTLQTGVPSRFSGSGSGTDFTLTINSLQPEDIGTYYCQQYESLPLTFGGGTKVEIK

SEQ ID NO: 1043 - protein, 483 aa, Artificial Sequence
  source: /note="Description of Artificial Sequence: Synthetic polypeptide"
MALPVTALLLPLALLLHAARPQVQLVESGGGLVQPGGSLRLSCAVSGFALSNHGMSWVRRAPGKGLEWVSGIVYSGSTYYAASVKGRFTISRDNSRNTLYLQMNSLRPEDTAIYYCSAHGGESDVWGQGTTVTVSSASGGGGSGGRASGGGGSDIRLTQSPSPLSASVGDRVTITCQASEDINKFLNWYHQTPGKAPKLLIYDASTLQTGVPSRFSGSGSGTDFTLTINSLQPEDIGTYYCQQYESLPLTFGGGTKVEIKTTTPAPRPPTPAPTIASQPLSLRPEACRPAAGGAVHTRGLDFACDIYIWAPLAGTCGVLLLSLVITLYCKRGRKKLLYIFKQPFMRPVQTTQEEDGCSCRFPEEEEGGCELRVKFSRSADAPAYKQGQNQLYNELNLGRREEYDVLDKRRGRDPEMGGKPRRKNPQEGLYNELQKDKMAEAYSEIGMKGERRRGKGHDGLYQGLSTATKDTYDALHMQALPPR

SEQ ID NO: 1044 - DNA, 1449 bp, Artificial Sequence
  source: /note="Description of Artificial Sequence: Synthetic polynucleotide"
atggccctccctgtcaccgccctgctgcttccgctggctcttctgctccacgccgctcggccccaagtgcaactcgtggaatctggtggaggactcgtgcaacccggtggaagccttaggctgtcgtgcgccgtcagcgggtttgctctgagcaaccatggaatgtcctgggtccgccgggcaccgggaaaagggctggaatgggtgtccggcatcgtgtacagcgggtcaacctattacgccgcgtccgtgaagggcagattcactatctcaagagacaacagccggaacaccctgtacttgcaaatgaattccctgcgccccgaggacaccgccatctactactgctccgcccacggaggagagtcggacgtgtggggccagggaacgactgtgactgtgtccagcgcatcaggagggggtggttcgggcggccgggcctcggggggaggaggttccgacattcggctgacccagtccccgtccccactgtcggcctccgtcggcgaccgcgtgaccatcacttgtcaggcgtccgaggacattaacaagttcctgaactggtaccaccagacccctggaaaggcccccaagctgctgatctacgatgcctcgacccttcaaactggagtgcctagccggttctccgggtccggctccggcactgatttcactctgaccatcaactcattgcagccggaagatatcgggacctactattgccagcagtacgaatccctcccgctcacattcggcgggggaaccaaggtcgagattaagaccactaccccagcaccgaggccacccaccccggctcctaccatcgcctcccagcctctgtccctgcgtccggaggcatgtagacccgcagctggtggggccgtgcatacccggggtcttgacttcgcctgcgatatctacatttgggcccctctggctggtacttgcggggtcctgctgctttcactcgtgatcactctttactgtaagcgcggtcggaagaagctgctgtacatctttaagcaacccttcatgaggcctgtgcagactactcaagaggaggacggctgttcatgccggttcccagaggaggaggaaggcggctgcgaactgcgcgtgaaattcagccgcagcgcagatgctccagcctacaagcaggggcagaaccagctctacaacgaactcaatcttggtcggagagaggagtacgacgtgctggacaagcggagaggacgggacccagaaatgggcgggaagccgcgcagaaagaatccccaagagggcctgtacaacgagctccaaaaggataagatggcagaagcctatagcgagattggtatgaaaggggaacgcagaagaggcaaaggccacgacggactgtaccagggactcagcaccgccaccaaggacacctatgacgctcttcacatgcaggccctgccgcctcgg

SEQ ID NO: 1045 - protein, 240 aa, Artificial Sequence
  source: /note="Description of Artificial Sequence: Synthetic polypeptide"
EVQLVETGGGLVQPGGSLRLSCAVSGFALSNHGMSWVRRAPGKGLEWVSGIVYSGSTYYAASVKGRFTISRDNSRNTLYLQMNSLRPEDTAIYYCSAHGGESDVWGQGTTVTVSSASGGGGSGGRASGGGGSETTLTQSPATLSVSPGERATLSCRASQSVGSNLAWYQQKPGQGPRLLIYGASTRATGIPARFSGSGSGTEFTLTISSLQPEDFAVYYCQQYNDWLPVTFGQGTKVEIK

SEQ ID NO: 1046 - DNA, 720 bp, Artificial Sequence
  source: /note="Description of Artificial Sequence: Synthetic polynucleotide"
gaagtgcaattggtggaaactggaggaggacttgtgcaacctggaggatcattgcggctctcatgcgctgtctccggcttcgccctgtcaaatcacgggatgtcgtgggtcagacgggccccgggaaagggtctggaatgggtgtcggggattgtgtacagcggctccacctactacgccgcttcggtcaagggccgcttcactatttcacgggacaacagccgcaacaccctctatctgcaaatgaactctctccgcccggaggataccgccatctactactgctccgcacacggcggcgaatccgacgtgtggggacagggaaccactgtcaccgtgtcgtccgcatccggtggcggaggatcgggtggccgggcctccgggggcggcggcagcgagactaccctgacccagtcccctgccactctgtccgtgagcccgggagagagagccacccttagctgccgggccagccagagcgtgggctccaacctggcctggtaccagcagaagccaggacagggtcccaggctgctgatctacggagcctccactcgcgcgaccggcatccccgcgaggttctccgggtcgggttccgggaccgagttcaccctgaccatctcctccctccaaccggaggacttcgcggtgtactactgtcagcagtacaacgattggctgcccgtgacatttggacaggggacgaaggtggaaatcaaa

SEQ ID NO: 1047 - protein, 115 aa, Artificial Sequence; identical to SEQ ID NO: 1017
  source: /note="Description of Artificial Sequence: Synthetic polypeptide"

SEQ ID NO: 1048 - protein, 108 aa, Artificial Sequence
  source: /note="Description of Artificial Sequence: Synthetic polypeptide"
ETTLTQSPATLSVSPGERATLSCRASQSVGSNLAWYQQKPGQGPRLLIYGASTRATGIPARFSGSGSGTEFTLTISSLQPEDFAVYYCQQYNDWLPVTFGQGTKVEIK

SEQ ID NO: 1049 - protein, 484 aa, Artificial Sequence
  source: /note="Description of Artificial Sequence: Synthetic polypeptide"
MALPVTALLLPLALLLHAARPEVQLVETGGGLVQPGGSLRLSCAVSGFALSNHGMSWVRRAPGKGLEWVSGIVYSGSTYYAASVKGRFTISRDNSRNTLYLQMNSLRPEDTAIYYCSAHGGESDVWGQGTTVTVSSASGGGGSGGRASGGGGSETTLTQSPATLSVSPGERATLSCRASQSVGSNLAWYQQKPGQGPRLLIYGASTRATGIPARFSGSGSGTEFTLTISSLQPEDFAVYYCQQYNDWLPVTFGQGTKVEIKTTTPAPRPPTPAPTIASQPLSLRPEACRPAAGGAVHTRGLDFACDIYIWAPLAGTCGVLLLSLVITLYCKRGRKKLLYIFKQPFMRPVQTTQEEDGCSCRFPEEEEGGCELRVKFSRSADAPAYKQGQNQLYNELNLGRREEYDVLDKRRGRDPEMGGKPRRKNPQEGLYNELQKDKMAEAYSEIGMKGERRRGKGHDGLYQGLSTATKDTYDALHMQALPPR

SEQ ID NO: 1050 - DNA, 1452 bp, Artificial Sequence
  source: /note="Description of Artificial Sequence: Synthetic polynucleotide"
atggccctccctgtcaccgccctgctgcttccgctggctcttctgctccacgccgctcggcccgaagtgcaattggtggaaactggaggaggacttgtgcaacctggaggatcattgcggctctcatgcgctgtctccggcttcgccctgtcaaatcacgggatgtcgtgggtcagacgggccccgggaaagggtctggaatgggtgtcggggattgtgtacagcggctccacctactacgccgcttcggtcaagggccgcttcactatttcacgggacaacagccgcaacaccctctatctgcaaatgaactctctccgcccggaggataccgccatctactactgctccgcacacggcggcgaatccgacgtgtggggacagggaaccactgtcaccgtgtcgtccgcatccggtggcggaggatcgggtggccgggcctccgggggcggcggcagcgagactaccctgacccagtcccctgccactctgtccgtgagcccgggagagagagccacccttagctgccgggccagccagagcgtgggctccaacctggcctggtaccagcagaagccaggacagggtcccaggctgctgatctacggagcctccactcgcgcgaccggcatccccgcgaggttctccgggtcgggttccgggaccgagttcaccctgaccatctcctccctccaaccggaggacttcgcggtgtactactgtcagcagtacaacgattggctgcccgtgacatttggacaggggacgaaggtggaaatcaaaaccactaccccagcaccgaggccacccaccccggctcctaccatcgcctcccagcctctgtccctgcgtccggaggcatgtagacccgcagctggtggggccgtgcatacccggggtcttgacttcgcctgcgatatctacatttgggcccctctggctggtacttgcggggtcctgctgctttcactcgtgatcactctttactgtaagcgcggtcggaagaagctgctgtacatctttaagcaacccttcatgaggcctgtgcagactactcaagaggaggacggctgttcatgccggttcccagaggaggaggaaggcggctgcgaactgcgcgtgaaattcagccgcagcgcagatgctccagcctacaagcaggggcagaaccagctctacaacgaactcaatcttggtcggagagaggagtacgacgtgctggacaagcggagaggacgggacccagaaatgggcgggaagccgcgcagaaagaatccccaagagggcctgtacaacgagctccaaaaggataagatggcagaagcctatagcgagattggtatgaaaggggaacgcagaagaggcaaaggccacgacggactgtaccagggactcagcaccgccaccaaggacacctatgacgctcttcacatgcaggccctgccgcctcgg

SEQ ID NO: 1051 - protein, 241 aa, Artificial Sequence
  source: /note="Description of Artificial Sequence: Synthetic polypeptide"
EVQLVESGGGLVQPGGSLRLSCAVSGFALSNHGMSWVRRAPGKGLEWVSGIVYSGSTYYAASVKGRFTISRDNSRNTLYLQMNSLRPEDTAIYYCSAHGGESDVWGQGTTVTVSSASGGGGSGGRASGGGGSEIVLTQSPGTLSLSPGERATLSCRASQSIGSSSLAWYQQKPGQAPRLLMYGASSRASGIPDRFSGSGSGTDFTLTISRLEPEDFAVYYCQQYAGSPPFTFGQGTKVEIK

SEQ ID NO: 1052 - DNA, 723 bp, Artificial Sequence
  source: /note="Description of Artificial Sequence: Synthetic polynucleotide"
gaagtgcaattggtggaatctggtggaggacttgtgcaacctggaggatcactgagactgtcatgcgcggtgtccggttttgccctgagcaatcatgggatgtcgtgggtccggcgcgcccccggaaagggtctggaatgggtgtcgggtatcgtctactccgggagcacttactacgccgcgagcgtgaagggccgcttcaccatttcccgcgataactcccgcaacaccctgtacttgcaaatgaactcgctccggcctgaggacactgccatctactactgctccgcacacggaggagaatccgacgtgtggggccagggaactaccgtgaccgtcagcagcgcctccggcggcgggggctcaggcggacgggctagcggcggcggtggctccgagatcgtgctgacccagtcgcctggcactctctcgctgagccccggggaaagggcaaccctgtcctgtcgggccagccagtccattggatcatcctccctcgcctggtatcagcagaaaccgggacaggctccgcggctgcttatgtatggggccagctcaagagcctccggcattcccgaccggttctccgggtccggttccggcaccgatttcaccctgactatctcgaggctggagccagaggacttcgccgtgtactactgccagcagtacgcggggtccccgccgttcacgttcggacagggaaccaaggtcgagatcaag

SEQ ID NO: 1053 - protein, 115 aa, Artificial Sequence; identical to SEQ ID NO: 969
  source: /note="Description of Artificial Sequence: Synthetic polypeptide"

SEQ ID NO: 1054 - protein, 109 aa, Artificial Sequence
  source: /note="Description of Artificial Sequence: Synthetic polypeptide"
EIVLTQSPGTLSLSPGERATLSCRASQSIGSSSLAWYQQKPGQAPRLLMYGASSRASGIPDRFSGSGSGTDFTLTISRLEPEDFAVYYCQQYAGSPPFTFGQGTKVEIK

SEQ ID NO: 1055 - protein, 485 aa, Artificial Sequence
  source: /note="Description of Artificial Sequence: Synthetic polypeptide"
MALPVTALLLPLALLLHAARPEVQLVESGGGLVQPGGSLRLSCAVSGFALSNHGMSWVRRAPGKGLEWVSGIVYSGSTYYAASVKGRFTISRDNSRNTLYLQMNSLRPEDTAIYYCSAHGGESDVWGQGTTVTVSSASGGGGSGGRASGGGGSEIVLTQSPGTLSLSPGERATLSCRASQSIGSSSLAWYQQKPGQAPRLLMYGASSRASGIPDRFSGSGSGTDFTLTISRLEPEDFAVYYCQQYAGSPPFTFGQGTKVEIKTTTPAPRPPTPAPTIASQPLSLRPEACRPAAGGAVHTRGLDFACDIYIWAPLAGTCGVLLLSLVITLYCKRGRKKLLYIFKQPFMRPVQTTQEEDGCSCRFPEEEEGGCELRVKFSRSADAPAYKQGQNQLYNELNLGRREEYDVLDKRRGRDPEMGGKPRRKNPQEGLYNELQKDKMAEAYSEIGMKGERRRGKGHDGLYQGLSTATKDTYDALHMQALPPR

SEQ ID NO: 1056 - DNA, 1455 bp, Artificial Sequence
  source: /note="Description of Artificial Sequence: Synthetic polynucleotide"
atggccctccctgtcaccgccctgctgcttccgctggctcttctgctccacgccgctcggcccgaagtgcaattggtggaatctggtggaggacttgtgcaacctggaggatcactgagactgtcatgcgcggtgtccggttttgccctgagcaatcatgggatgtcgtgggtccggcgcgcccccggaaagggtctggaatgggtgtcgggtatcgtctactccgggagcacttactacgccgcgagcgtgaagggccgcttcaccatttcccgcgataactcccgcaacaccctgtacttgcaaatgaactcgctccggcctgaggacactgccatctactactgctccgcacacggaggagaatccgacgtgtggggccagggaactaccgtgaccgtcagcagcgcctccggcggcgggggctcaggcggacgggctagcggcggcggtggctccgagatcgtgctgacccagtcgcctggcactctctcgctgagccccggggaaagggcaaccctgtcctgtcgggccagccagtccattggatcatcctccctcgcctggtatcagcagaaaccgggacaggctccgcggctgcttatgtatggggccagctcaagagcctccggcattcccgaccggttctccgggtccggttccggcaccgatttcaccctgactatctcgaggctggagccagaggacttcgccgtgtactactgccagcagtacgcggggtccccgccgttcacgttcggacagggaaccaaggtcgagatcaagaccactaccccagcaccgaggccacccaccccggctcctaccatcgcctcccagcctctgtccctgcgtccggaggcatgtagacccgcagctggtggggccgtgcatacccggggtcttgacttcgcctgcgatatctacatttgggcccctctggctggtacttgcggggtcctgctgctttcactcgtgatcactctttactgtaagcgcggtcggaagaagctgctgtacatctttaagcaacccttcatgaggcctgtgcagactactcaagaggaggacggctgttcatgccggttcccagaggaggaggaaggcggctgcgaactgcgcgtgaaattcagccgcagcgcagatgctccagcctacaagcaggggcagaaccagctctacaacgaactcaatcttggtcggagagaggagtacgacgtgctggacaagcggagaggacgggacccagaaatgggcgggaagccgcgcagaaagaatccccaagagggcctgtacaacgagctccaaaaggataagatggcagaagcctatagcgagattggtatgaaaggggaacgcagaagaggcaaaggccacgacggactgtaccagggactcagcaccgccaccaaggacacctatgacgctcttcacatgcaggccctgccgcctcgg

SEQ ID NO: 1057 - protein, 243 aa, Artificial Sequence
  source: /note="Description of Artificial Sequence: Synthetic polypeptide"
QVQLQESGPGLVKPSETLSLTCTVSGGSISSSYYYWGWIRQPPGKGLEWIGSIYYSGSAYYNPSLKSRVTISVDTSKNQFSLRLSSVTAADTAVYYCARHWQEWPDAFDIWGQGTMVTVSSGGGGSGGGGSGGGGSETTLTQSPAFMSATPGDKVIISCKASQDIDDAMNWYQQKPGEAPLFIIQSATSPVPGIPPRFSGSGFGTDFSLTINNIESEDAAYYFCLQHDNFPLTFGQGTKLEIK

SEQ ID NO: 1058 - DNA, 729 bp, Artificial Sequence
  source: /note="Description of Artificial Sequence: Synthetic polynucleotide"
caagtgcagcttcaggaaagcggaccgggcctggtcaagccatccgaaactctctccctgacttgcactgtgtctggcggttccatctcatcgtcgtactactactggggctggattaggcagccgcccggaaagggactggagtggatcggaagcatctactattccggctcggcgtactacaaccctagcctcaagtcgagagtgaccatctccgtggatacctccaagaaccagttttccctgcgcctgagctccgtgaccgccgctgacaccgccgtgtactactgtgctcggcattggcaggaatggcccgatgccttcgacatttggggccagggcactatggtcactgtgtcatccgggggtggaggcagcgggggaggagggtccggggggggaggttcagagacaaccttgacccagtcacccgcattcatgtccgccactccgggagacaaggtcatcatctcgtgcaaagcgtcccaggatatcgacgatgccatgaattggtaccagcagaagcctggcgaagcgccgctgttcattatccaatccgcaacctcgcccgtgcctggaatcccaccgcggttcagcggcagcggtttcggaaccgacttttccctgaccattaacaacattgagtccgaggacgccgcctactacttctgcctgcaacacgacaacttccctctcacgttcggccagggaaccaagctggaaatcaag

SEQ ID NO: 1059 - protein, 121 aa, Artificial Sequence
  source: /note="Description of Artificial Sequence: Synthetic polypeptide"
QVQLQESGPGLVKPSETLSLTCTVSGGSISSSYYYWGWIRQPPGKGLEWIGSIYYSGSAYYNPSLKSRVTISVDTSKNQFSLRLSSVTAADTAVYYCARHWQEWPDAFDIWGQGTMVTVSS

SEQ ID NO: 1060 - protein, 107 aa, Artificial Sequence
  source: /note="Description of Artificial Sequence: Synthetic polypeptide"
ETTLTQSPAFMSATPGDKVIISCKASQDIDDAMNWYQQKPGEAPLFIIQSATSPVPGIPPRFSGSGFGTDFSLTINNIESEDAAYYFCLQHDNFPLTFGQGTKLEIK

SEQ ID NO: 1061 - protein, 487 aa, Artificial Sequence
  source: /note="Description of Artificial Sequence: Synthetic polypeptide"
MALPVTALLLPLALLLHAARPQVQLQESGPGLVKPSETLSLTCTVSGGSISSSYYYWGWIRQPPGKGLEWIGSIYYSGSAYYNPSLKSRVTISVDTSKNQFSLRLSSVTAADTAVYYCARHWQEWPDAFDIWGQGTMVTVSSGGGGSGGGGSGGGGSETTLTQSPAFMSATPGDKVIISCKASQDIDDAMNWYQQKPGEAPLFIIQSATSPVPGIPPRFSGSGFGTDFSLTINNIESEDAAYYFCLQHDNFPLTFGQGTKLEIKTTTPAPRPPTPAPTIASQPLSLRPEACRPAAGGAVHTRGLDFACDIYIWAPLAGTCGVLLLSLVITLYCKRGRKKLLYIFKQPFMRPVQTTQEEDGCSCRFPEEEEGGCELRVKFSRSADAPAYKQGQNQLYNELNLGRREEYDVLDKRRGRDPEMGGKPRRKNPQEGLYNELQKDKMAEAYSEIGMKGERRRGKGHDGLYQGLSTATKDTYDALHMQALPPR

SEQ ID NO: 1062 - DNA, 1461 bp, Artificial Sequence
  source: /note="Description of Artificial Sequence: Synthetic polynucleotide"
atggccctccctgtcaccgccctgctgcttccgctggctcttctgctccacgccgctcggccccaagtgcagcttcaggaaagcggaccgggcctggtcaagccatccgaaactctctccctgacttgcactgtgtctggcggttccatctcatcgtcgtactactactggggctggattaggcagccgcccggaaagggactggagtggatcggaagcatctactattccggctcggcgtactacaaccctagcctcaagtcgagagtgaccatctccgtggatacctccaagaaccagttttccctgcgcctgagctccgtgaccgccgctgacaccgccgtgtactactgtgctcggcattggcaggaatggcccgatgccttcgacatttggggccagggcactatggtcactgtgtcatccgggggtggaggcagcgggggaggagggtccggggggggaggttcagagacaaccttgacccagtcacccgcattcatgtccgccactccgggagacaaggtcatcatctcgtgcaaagcgtcccaggatatcgacgatgccatgaattggtaccagcagaagcctggcgaagcgccgctgttcattatccaatccgcaacctcgcccgtgcctggaatcccaccgcggttcagcggcagcggtttcggaaccgacttttccctgaccattaacaacattgagtccgaggacgccgcctactacttctgcctgcaacacgacaacttccctctcacgttcggccagggaaccaagctggaaatcaagaccactaccccagcaccgaggccacccaccccggctcctaccatcgcctcccagcctctgtccctgcgtccggaggcatgtagacccgcagctggtggggccgtgcatacccggggtcttgacttcgcctgcgatatctacatttgggcccctctggctggtacttgcggggtcctgctgctttcactcgtgatcactctttactgtaagcgcggtcggaagaagctgctgtacatctttaagcaacccttcatgaggcctgtgcagactactcaagaggaggacggctgttcatgccggttcccagaggaggaggaaggcggctgcgaactgcgcgtgaaattcagccgcagcgcagatgctccagcctacaagcaggggcagaaccagctctacaacgaactcaatcttggtcggagagaggagtacgacgtgctggacaagcggagaggacgggacccagaaatgggcgggaagccgcgcagaaagaatccccaagagggcctgtacaacgagctccaaaaggataagatggcagaagcctatagcgagattggtatgaaaggggaacgcagaagaggcaaaggccacgacggactgtaccagggactcagcaccgccaccaaggacacctatgacgctcttcacatgcaggccctgccgcctcgg

SEQ ID NO: 1063 - protein, 244 aa, Artificial Sequence
  source: /note="Description of Artificial Sequence: Synthetic polypeptide"
VNLRESGPALVKPTQTLTLTCTFSGFSLRTSGMCVSWIRQPPGKALEWLARIDWDEDKFYSTSLKTRLTISKDTSDNQVVLRMTNMDPADTATYYCARSGAGGTSATAFDIWGPGTMVTVSSGGGGSGGGGSGGGGSDIQMTQSPSSLSASVGDRVTITCRASQDIYNNLAWFQLKPGSAPRSLMYAANKSQSGVPSRFSGSASGTDFTLTISSLQPEDFATYYCQHYYRFPYSFGQGTKLEIK

SEQ ID NO: 1064 - DNA, 735 bp, Artificial Sequence
  source: /note="Description of Artificial Sequence: Synthetic polynucleotide"
caagtcaatctgcgcgaatccggccccgccttggtcaagcctacccagaccctcactctgacctgtactttctccggcttctccctgcggacttccgggatgtgcgtgtcctggatcagacagcctccgggaaaggccctggagtggctcgctcgcattgactgggatgaggacaagttctactccacctcactcaagaccaggctgaccatcagcaaagatacctctgacaaccaagtggtgctccgcatgaccaacatggacccagccgacactgccacttactactgcgcgaggagcggagcgggcggaacctccgccaccgccttcgatatttggggcccgggtaccatggtcaccgtgtcaagcggaggaggggggtccgggggcggcggttccgggggaggcggatcggacattcagatgactcagtcaccatcgtccctgagcgctagcgtgggcgacagagtgacaatcacttgccgggcatcccaggacatctataacaaccttgcgtggttccagctgaagcctggttccgcaccgcggtcacttatgtacgccgccaacaagagccagtcgggagtgccgtcccggttttccggttcggcctcgggaactgacttcaccctgacgatctccagcctgcaacccgaggatttcgccacctactactgccagcactactaccgctttccctactcgttcggacagggaaccaagctggaaatcaag

SEQ ID NO: 1065 - protein, 123 aa, Artificial Sequence
  source: /note="Description of Artificial Sequence: Synthetic polypeptide"
QVNLRESGPALVKPTQTLTLTCTFSGFSLRTSGMCVSWIRQPPGKALEWLARIDWDEDKFYSTSLKTRLTISKDTSDNQVVLRMTNMDPADTATYYCARSGAGGTSATAFDIWGPGTMVTVSS

SEQ ID NO: 1066 - protein, 107 aa, Artificial Sequence
  source: /note="Description of Artificial Sequence: Synthetic polypeptide"
DIQMTQSPSSLSASVGDRVTITCRASQDIYNNLAWFQLKPGSAPRSLMYAANKSQSGVPSRFSGSASGTDFTLTISSLQPEDFATYYCQHYYRFPYSFGQGTKLEIK

SEQ ID NO: 1067 - protein, 489 aa, Artificial Sequence
  source: /note="Description of Artificial Sequence: Synthetic polypeptide"
MALPVTALLLPLALLLHAARPQVNLRESGPALVKPTQTLTLTCTFSGFSLRTSGMCVSWIRQPPGKALEWLARIDWDEDKFYSTSLKTRLTISKDTSDNQVVLRMTNMDPADTATYYCARSGAGGTSATAFDIWGPGTMVTVSSGGGGSGGGGSGGGGSDIQMTQSPSSLSASVGDRVTITCRASQDIYNNLAWFQLKPGSAPRSLMYAANKSQSGVPSRFSGSASGTDFTLTISSLQPEDFATYYCQHYYRFPYSFGQGTKLEIKTTTPAPRPPTPAPTIASQPLSLRPEACRPAAGGAVHTRGLDFACDIYIWAPLAGTCGVLLLSLVITLYCKRGRKKLLYIFKQPFMRPVQTTQEEDGCSCRFPEEEEGGCELRVKFSRSADAPAYKQGQNQLYNELNLGRREEYDVLDKRRGRDPEMGGKPRRKNPQEGLYNELQKDKMAEAYSEIGMKGERRRGKGHDGLYQGLSTATKDTYDALHMQALPPR

SEQ ID NO: 1068 - DNA, 1467 bp, Artificial Sequence
  source: /note="Description of Artificial Sequence: Synthetic polynucleotide"
atggccctccctgtcaccgccctgctgcttccgctggctcttctgctccacgccgctcggccccaagtcaatctgcgcgaatccggccccgccttggtcaagcctacccagaccctcactctgacctgtactttctccggcttctccctgcggacttccgggatgtgcgtgtcctggatcagacagcctccgggaaaggccctggagtggctcgctcgcattgactgggatgaggacaagttctactccacctcactcaagaccaggctgaccatcagcaaagatacctctgacaaccaagtggtgctccgcatgaccaacatggacccagccgacactgccacttactactgcgcgaggagcggagcgggcggaacctccgccaccgccttcgatatttggggcccgggtaccatggtcaccgtgtcaagcggaggaggggggtccgggggcggcggttccgggggaggcggatcggacattcagatgactcagtcaccatcgtccctgagcgctagcgtgggcgacagagtgacaatcacttgccgggcatcccaggacatctataacaaccttgcgtggttccagctgaagcctggttccgcaccgcggtcacttatgtacgccgccaacaagagccagtcgggagtgccgtcccggttttccggttcggcctcgggaactgacttcaccctgacgatctccagcctgcaacccgaggatttcgccacctactactgccagcactactaccgctttccctactcgttcggacagggaaccaagctggaaatcaagaccactaccccagcaccgaggccacccaccccggctcctaccatcgcctcccagcctctgtccctgcgtccggaggcatgtagacccgcagctggtggggccgtgcatacccggggtcttgacttcgcctgcgatatctacatttgggcccctctggctggtacttgcggggtcctgctgctttcactcgtgatcactctttactgtaagcgcggtcggaagaagctgctgtacatctttaagcaacccttcatgaggcctgtgcagactactcaagaggaggacggctgttcatgccggttcccagaggaggaggaaggcggctgcgaactgcgcgtgaaattcagccgcagcgcagatgctccagcctacaagcaggggcagaaccagctctacaacgaactcaatcttggtcggagagaggagtacgacgtgctggacaagcggagaggacgggacccagaaatgggcgggaagccgcgcagaaagaatccccaagagggcctgtacaacgagctccaaaaggataagatggcagaagcctatagcgagattggtatgaaaggggaacgcagaagaggcaaaggccacgacggactgtaccagggactcagcaccgccaccaaggacacctatgacgctcttcacatgcaggccctgccgcctcgg

SEQ ID NO: 1069 - protein, 246 aa, Artificial Sequence
  source: /note="Description of Artificial Sequence: Synthetic polypeptide"
EVQLVESGGGLVKPGGSLRLSCAASGFTFSSYSMNWVRQAPGKGLEWVSSISSSSSYIYYADSVKGRFTISRDNAKNSLYLQMNSLRAEDTAVYYCAKTIAAVYAFDIWGQGTTVTVSSGGGGSGGGGSGGGGSEIVLTQSPLSLPVTPEEPASISCRSSQSLLHSNGYNYLDWYLQKPGQSPQLLIYLGSNRASGVPDRFSGSGSGTDFTLKISRVEAEDVGVYYCMQALQTPYTFGQGTKLEIK

SEQ ID NO: 1070 - DNA, 738 bp, Artificial Sequence
  source: /note="Description of Artificial Sequence: Synthetic polynucleotide"
gaagtgcagcttgtcgaatccggggggggactggtcaagccgggcggatcactgagactgtcctgcgccgcgagcggcttcacgttctcctcctactccatgaactgggtccgccaagcccccgggaagggactggaatgggtgtcctctatctcctcgtcgtcgtcctacatctactacgccgactccgtgaagggaagattcaccatttcccgcgacaacgcaaagaactcactgtacttgcaaatgaactcactccgggccgaagatactgctgtgtactattgcgccaagactattgccgccgtctacgctttcgacatctggggccagggaaccaccgtgactgtgtcgtccggtggtggtggctcgggcggaggaggaagcggcggcggggggtccgagattgtgctgacccagtcgccactgagcctccctgtgacccccgaggaacccgccagcatcagctgccggtccagccagtccctgctccactccaacggatacaattacctcgattggtaccttcagaagcctggacaaagcccgcagctgctcatctacttgggatcaaaccgcgcgtcaggagtgcctgaccggttctccggctcgggcagcggtaccgatttcaccctgaaaatctccagggtggaggcagaggacgtgggagtgtattactgtatgcaggcgctgcagactccgtacacatttgggcagggcaccaagctggagatcaag

SEQ ID NO: 1071 - protein, 119 aa, Artificial Sequence
  source: /note="Description of Artificial Sequence: Synthetic polypeptide"
EVQLVESGGGLVKPGGSLRLSCAASGFTFSSYSMNWVRQAPGKGLEWVSSISSSSSYIYYADSVKGRFTISRDNAKNSLYLQMNSLRAEDTAVYYCAKTIAAVYAFDIWGQGTTVTVSS

SEQ ID NO: 1072 - protein, 112 aa, Artificial Sequence
  source: /note="Description of Artificial Sequence: Synthetic polypeptide"
EIVLTQSPLSLPVTPEEPASISCRSSQSLLHSNGYNYLDWYLQKPGQSPQLLIYLGSNRASGVPDRFSGSGSGTDFTLKISRVEAEDVGVYYCMQALQTPYTFGQGTKLEIK

SEQ ID NO: 1073 - protein, 490 aa, Artificial Sequence
  source: /note="Description of Artificial Sequence: Synthetic polypeptide"
MALPVTALLLPLALLLHAARPEVQLVESGGGLVKPGGSLRLSCAASGFTFSSYSMNWVRQAPGKGLEWVSSISSSSSYIYYADSVKGRFTISRDNAKNSLYLQMNSLRAEDTAVYYCAKTIAAVYAFDIWGQGTTVTVSSGGGGSGGGGSGGGGSEIVLTQSPLSLPVTPEEPASISCRSSQSLLHSNGYNYLDWYLQKPGQSPQLLIYLGSNRASGVPDRFSGSGSGTDFTLKISRVEAEDVGVYYCMQALQTPYTFGQGTKLEIKTTTPAPRPPTPAPTIASQPLSLRPEACRPAAGGAVHTRGLDFACDIYIWAPLAGTCGVLLLSLVITLYCKRGRKKLLYIFKQPFMRPVQTTQEEDGCSCRFPEEEEGGCELRVKFSRSADAPAYKQGQNQLYNELNLGRREEYDVLDKRRGRDPEMGGKPRRKNPQEGLYNELQKDKMAEAYSEIGMKGERRRGKGHDGLYQGLSTATKDTYDALHMQALPPR

SEQ ID NO: 1074 - DNA, 1470 bp, Artificial Sequence
  source: /note="Description of Artificial Sequence: Synthetic polynucleotide"
atggccctccctgtcaccgccctgctgcttccgctggctcttctgctccacgccgctcggcccgaagtgcagcttgtcgaatccggggggggactggtcaagccgggcggatcactgagactgtcctgcgccgcgagcggcttcacgttctcctcctactccatgaactgggtccgccaagcccccgggaagggactggaatgggtgtcctctatctcctcgtcgtcgtcctacatctactacgccgactccgtgaagggaagattcaccatttcccgcgacaacgcaaagaactcactgtacttgcaaatgaactcactccgggccgaagatactgctgtgtactattgcgccaagactattgccgccgtctacgctttcgacatctggggccagggaaccaccgtgactgtgtcgtccggtggtggtggctcgggcggaggaggaagcggcggcggggggtccgagattgtgctgacccagtcgccactgagcctccctgtgacccccgaggaacccgccagcatcagctgccggtccagccagtccctgctccactccaacggatacaattacctcgattggtaccttcagaagcctggacaaagcccgcagctgctcatctacttgggatcaaaccgcgcgtcaggagtgcctgaccggttctccggctcgggcagcggtaccgatttcaccctgaaaatctccagggtggaggcagaggacgtgggagtgtattactgtatgcaggcgctgcagactccgtacacatttgggcagggcaccaagctggagatcaagaccactaccccagcaccgaggccacccaccccggctcctaccatcgcctcccagcctctgtccctgcgtccggaggcatgtagacccgcagctggtggggccgtgcatacccggggtcttgacttcgcctgcgatatctacatttgggcccctctggctggtacttgcggggtcctgctgctttcactcgtgatcactctttactgtaagcgcggtcggaagaagctgctgtacatctttaagcaacccttcatgaggcctgtgcagactactcaagaggaggacggctgttcatgccggttcccagaggaggaggaaggcggctgcgaactgcgcgtgaaattcagccgcagcgcagatgctccagcctacaagcaggggcagaaccagctctacaacgaactcaatcttggtcggagagaggagtacgacgtgctggacaagcggagaggacgggacccagaaatgggcgggaagccgcgcagaaagaatccccaagagggcctgtacaacgagctccaaaaggataagatggcagaagcctatagcgagattggtatgaaaggggaacgcagaagaggcaaaggccacgacggactgtaccagggactcagcaccgccaccaaggacacctatgacgctcttcacatgcaggccctgccgcctcgg

SEQ ID NO: 1075 - protein, 240 aa, Artificial Sequence
  source: /note="Description of Artificial Sequence: Synthetic polypeptide"
EVQLVESGGGLVKPGGSLRLSCAASGFTFSDYYMSWIRQAPGKGLEWVSYISSSGSTIYYADSVKGRFTISRDNAKNSLYLQMNSLRAEDTAVYYCARDLRGAFDIWGQGTMVTVSSGGGGSGGGGSGGGGSSYVLTQSPSVSAAPGYTATISCGGNNIGTKSVHWYQQKPGQAPLLVIRDDSVRPSKIPGRFSGSNSGNMATLTISGVQAGDEADFYCQVWDSDSEHVVFGGGTKLTVL

SEQ ID NO: 1076 - DNA, 720 bp, Artificial Sequence
  source: /note="Description of Artificial Sequence: Synthetic polynucleotide"
gaagtccagctcgtggagtccggcggaggccttgtgaagcctggaggttcgctgagactgtcctgcgccgcctccggcttcaccttctccgactactacatgtcctggatcagacaggccccgggaaagggcctggaatgggtgtcctacatctcgtcatcgggcagcactatctactacgcggactcagtgaaggggcggttcaccatttcccgggataacgcgaagaactcgctgtatctgcaaatgaactcactgagggccgaggacaccgccgtgtactactgcgcccgcgatctccgcggggcatttgacatctggggacagggaaccatggtcacagtgtccagcggagggggaggatcgggtggcggaggttccgggggtggaggctcctcctacgtgctgactcagagcccaagcgtcagcgctgcgcccggttacacggcaaccatctcctgtggcggaaacaacattgggaccaagtctgtgcactggtatcagcagaagccgggccaagctcccctgttggtgatccgcgatgactccgtgcggcctagcaaaattccgggacggttctccggctccaacagcggcaatatggccactctcaccatctcgggagtgcaggccggagatgaagccgacttctactgccaagtctgggactcagactccgagcatgtggtgttcgggggcggaaccaagctgactgtgctc

SEQ ID NO: 1077 - protein, 117 aa, Artificial Sequence
  source: /note="Description of Artificial Sequence: Synthetic polypeptide"
EVQLVESGGGLVKPGGSLRLSCAASGFTFSDYYMSWIRQAPGKGLEWVSYISSSGSTIYYADSVKGRFTISRDNAKNSLYLQMNSLRAEDTAVYYCARDLRGAFDIWGQGTMVTVSS

SEQ ID NO: 1078 - protein, 108 aa, Artificial Sequence
  source: /note="Description of Artificial Sequence: Synthetic polypeptide"
SYVLTQSPSVSAAPGYTATISCGGNNIGTKSVHWYQQKPGQAPLLVIRDDSVRPSKIPGRFSGSNSGNMATLTISGVQAGDEADFYCQVWDSDSEHVVFGGGTKLTVL

SEQ ID NO: 1079 - protein, 484 aa, Artificial Sequence
  source: /note="Description of Artificial Sequence: Synthetic polypeptide"
MALPVTALLLPLALLLHAARPEVQLVESGGGLVKPGGSLRLSCAASGFTFSDYYMSWIRQAPGKGLEWVSYISSSGSTIYYADSVKGRFTISRDNAKNSLYLQMNSLRAEDTAVYYCARDLRGAFDIWGQGTMVTVSSGGGGSGGGGSGGGGSSYVLTQSPSVSAAPGYTATISCGGNNIGTKSVHWYQQKPGQAPLLVIRDDSVRPSKIPGRFSGSNSGNMATLTISGVQAGDEADFYCQVWDSDSEHVVFGGGTKLTVLTTTPAPRPPTPAPTIASQPLSLRPEACRPAAGGAVHTRGLDFACDIYIWAPLAGTCGVLLLSLVITLYCKRGRKKLLYIFKQPFMRPVQTTQEEDGCSCRFPEEEEGGCELRVKFSRSADAPAYKQGQNQLYNELNLGRREEYDVLDKRRGRDPEMGGKPRRKNPQEGLYNELQKDKMAEAYSEIGMKGERRRGKGHDGLYQGLSTATKDTYDALHMQALPPR

SEQ ID NO: 1080 - DNA, 1452 bp, Artificial Sequence
  source: /note="Description of Artificial Sequence: Synthetic polynucleotide"
atggccctccctgtcaccgccctgctgcttccgctggctcttctgctccacgccgctcggcccgaagtccagctcgtggagtccggcggaggccttgtgaagcctggaggttcgctgagactgtcctgcgccgcctccggcttcaccttctccgactactacatgtcctggatcagacaggccccgggaaagggcctggaatgggtgtcctacatctcgtcatcgggcagcactatctactacgcggactcagtgaaggggcggttcaccatttcccgggataacgcgaagaactcgctgtatctgcaaatgaactcactgagggccgaggacaccgccgtgtactactgcgcccgcgatctccgcggggcatttgacatctggggacagggaaccatggtcacagtgtccagcggagggggaggatcgggtggcggaggttccgggggtggaggctcctcctacgtgctgactcagagcccaagcgtcagcgctgcgcccggttacacggcaaccatctcctgtggcggaaacaacattgggaccaagtctgtgcactggtatcagcagaagccgggccaagctcccctgttggtgatccgcgatgactccgtgcggcctagcaaaattccgggacggttctccggctccaacagcggcaatatggccactctcaccatctcgggagtgcaggccggagatgaagccgacttctactgccaagtctgggactcagactccgagcatgtggtgttcgggggcggaaccaagctgactgtgctcaccactaccccagcaccgaggccacccaccccggctcctaccatcgcctcccagcctctgtccctgcgtccggaggcatgtagacccgcagctggtggggccgtgcatacccggggtcttgacttcgcctgcgatatctacatttgggcccctctggctggtacttgcggggtcctgctgctttcactcgtgatcactctttactgtaagcgcggtcggaagaagctgctgtacatctttaagcaacccttcatgaggcctgtgcagactactcaagaggaggacggctgttcatgccggttcccagaggaggaggaaggcggctgcgaactgcgcgtgaaattcagccgcagcgcagatgctccagcctacaagcaggggcagaaccagctctacaacgaactcaatcttggtcggagagaggagtacgacgtgctggacaagcggagaggacgggacccagaaatgggcgggaagccgcgcagaaagaatccccaagagggcctgtacaacgagctccaaaaggataagatggcagaagcctatagcgagattggtatgaaaggggaacgcagaagaggcaaaggccacgacggactgtaccagggactcagcaccgccaccaaggacacctatgacgctcttcacatgcaggccctgccgcctcgg

SEQ ID NO: 1081 - protein, 241 aa, Artificial Sequence
  source: /note="Description of Artificial Sequence: Synthetic polypeptide"
QVQLVQSGAEVKKPGASVKVSCKPSGYTVTSHYIHWVRRAPGQGLEWMGMINPSGGVTAYSQTLQGRVTMTSDTSSSTVYMELSSLRSEDTAMYYCAREGSGSGWYFDFWGRGTLVTVSSGGGGSGGGGSGGGGSSYVLTQPPSVSVSPGQTASITCSGDGLSKKYVSWYQQKAGQSPVVLISRDKERPSGIPDRFSGSNSADTATLTISGTQAMDEADYYCQAWDDTTVVFGGGTKLTVL

SEQ ID NO: 1082 - DNA, 723 bp, Artificial Sequence
  source: /note="Description of Artificial Sequence: Synthetic polynucleotide"
caagtgcagctggtgcagagcggggccgaagtcaagaagccgggagcctccgtgaaagtgtcctgcaagccttcgggatacaccgtgacctcccactacattcattgggtccgccgcgcccccggccaaggactcgagtggatgggcatgatcaaccctagcggcggagtgaccgcgtacagccagacgctgcagggacgcgtgactatgacctcggatacctcctcctccaccgtctatatggaactgtccagcctgcggtccgaggataccgccatgtactactgcgcccgggaaggatcaggctccgggtggtatttcgacttctggggaagaggcaccctcgtgactgtgtcatctgggggagggggttccggtggtggcggatcgggaggaggcggttcatcctacgtgctgacccagccaccctccgtgtccgtgagccccggccagactgcatcgattacatgtagcggcgacggcctctccaagaaatacgtgtcgtggtaccagcagaaggccggacagagcccggtggtgctgatctcaagagataaggagcggcctagcggaatcccggacaggttctcgggttccaactccgcggacactgctactctgaccatctcggggacccaggctatggacgaagccgattactactgccaagcctgggacgacactactgtcgtgtttggagggggcaccaagttgaccgtcctt

SEQ ID NO: 1083 - protein, 120 aa, Artificial Sequence
  source: /note="Description of Artificial Sequence: Synthetic polypeptide"
QVQLVQSGAEVKKPGASVKVSCKPSGYTVTSHYIHWVRRAPGQGLEWMGMINPSGGVTAYSQTLQGRVTMTSDTSSSTVYMELSSLRSEDTAMYYCAREGSGSGWYFDFWGRGTLVTVSS

SEQ ID NO: 1084 - protein, 106 aa, Artificial Sequence
  source: /note="Description of Artificial Sequence: Synthetic polypeptide"
SYVLTQPPSVSVSPGQTASITCSGDGLSKKYVSWYQQKAGQSPVVLISRDKERPSGIPDRFSGSNSADTATLTISGTQAMDEADYYCQAWDDTTVVFGGGTKLTVL

SEQ ID NO: 1085 - protein, 485 aa, Artificial Sequence
  source: /note="Description of Artificial Sequence: Synthetic polypeptide"
MALPVTALLLPLALLLHAARPQVQLVQSGAEVKKPGASVKVSCKPSGYTVTSHYIHWVRRAPGQGLEWMGMINPSGGVTAYSQTLQGRVTMTSDTSSSTVYMELSSLRSEDTAMYYCAREGSGSGWYFDFWGRGTLVTVSSGGGGSGGGGSGGGGSSYVLTQPPSVSVSPGQTASITCSGDGLSKKYVSWYQQKAGQSPVVLISRDKERPSGIPDRFSGSNSADTATLTISGTQAMDEADYYCQAWDDTTVVFGGGTKLTVLTTTPAPRPPTPAPTIASQPLSLRPEACRPAAGGAVHTRGLDFACDIYIWAPLAGTCGVLLLSLVITLYCKRGRKKLLYIFKQPFMRPVQTTQEEDGCSCRFPEEEEGGCELRVKFSRSADAPAYKQGQNQLYNELNLGRREEYDVLDKRRGRDPEMGGKPRRKNPQEGLYNELQKDKMAEAYSEIGMKGERRRGKGHDGLYQGLSTATKDTYDALHMQALPPR

SEQ ID NO: 1086 - DNA, 1455 bp, Artificial Sequence
  source: /note="Description of Artificial Sequence: Synthetic polynucleotide"
atggccctccctgtcaccgccctgctgcttccgctggctcttctgctccacgccgctcggccccaagtgcagctggtgcagagcggggccgaagtcaagaagccgggagcctccgtgaaagtgtcctgcaagccttcgggatacaccgtgacctcccactacattcattgggtccgccgcgcccccggccaaggactcgagtggatgggcatgatcaaccctagcggcggagtgaccgcgtacagccagacgctgcagggacgcgtgactatgacctcggatacctcctcctccaccgtctatatggaactgtccagcctgcggtccgaggataccgccatgtactactgcgcccgggaaggatcaggctccgggtggtatttcgacttctggggaagaggcaccctcgtgactgtgtcatctgggggagggggttccggtggtggcggatcgggaggaggcggttcatcctacgtgctgacccagccaccctccgtgtccgtgagccccggccagactgcatcgattacatgtagcggcgacggcctctccaagaaatacgtgtcgtggtaccagcagaaggccggacagagcccggtggtgctgatctcaagagataaggagcggcctagcggaatcccggacaggttctcgggttccaactccgcggacactgctactctgaccatctcggggacccaggctatggacgaagccgattactactgccaagcctgggacgacactactgtcgtgtttggagggggcaccaagttgaccgtccttaccactaccccagcaccgaggccacccaccccggctcctaccatcgcctcccagcctctgtccctgcgtccggaggcatgtagacccgcagctggtggggccgtgcatacccggggtcttgacttcgcctgcgatatctacatttgggcccctctggctggtacttgcggggtcctgctgctttcactcgtgatcactctttactgtaagcgcggtcggaagaagctgctgtacatctttaagcaacccttcatgaggcctgtgcagactactcaagaggaggacggctgttcatgccggttcccagaggaggaggaaggcggctgcgaactgcgcgtgaaattcagccgcagcgcagatgctccagcctacaagcaggggcagaaccagctctacaacgaactcaatcttggtcggagagaggagtacgacgtgctggacaagcggagaggacgggacccagaaatgggcgggaagccgcgcagaaagaatccccaagagggcctgtacaacgagctccaaaaggataagatggcagaagcctatagcgagattggtatgaaaggggaacgcagaagaggcaaaggccacgacggactgtaccagggactcagcaccgccaccaaggacacctatgacgctcttcacatgcaggccctgccgcctcgg

SEQ ID NO: 1087 - protein, 245 aa, Artificial Sequence
  source: /note="Description of Artificial Sequence: Synthetic polypeptide"
QVQLQESGPGLVKPSQTLSLTCTVSGGSISSGGYYWSWIRQHPGKGLEWIGYIYYSGSTYYNPSLKSRVTISVDTSKNQFSLKLSSVTAADTAVYYCARAGIAARLRGAFDIWGQGTMVTVSSGGGGSGGGGSGGGGSDIVMTQSPSSVSASVGDRVIITCRASQGIRNWLAWYQQKPGKAPNLLIYAASNLQSGVPSRFSGSGSGADFTLTISSLQPEDVATYYCQKYNSAPFTFGPGTKVDIK

SEQ ID NO: 1088 - DNA, 735 bp, Artificial Sequence
  source: /note="Description of Artificial Sequence: Synthetic polynucleotide"
caagtgcagcttcaggagagcggcccgggactcgtgaagccgtcccagaccctgtccctgacttgcaccgtgtcgggaggaagcatctcgagcggaggctactattggtcgtggattcggcagcaccctggaaagggcctggaatggatcggctacatctactactccggctcgacctactacaacccatcgctgaagtccagagtgacaatctcagtggacacgtccaagaatcagttcagcctgaagctctcttccgtgactgcggccgacaccgccgtgtactactgcgcacgcgctggaattgccgcccggctgaggggtgccttcgacatttggggacagggcaccatggtcaccgtgtcctccggcggcggaggttccgggggtggaggctcaggaggaggggggtccgacatcgtcatgactcagtcgccctcaagcgtcagcgcgtccgtcggggacagagtgatcatcacctgtcgggcgtcccagggaattcgcaactggctggcctggtatcagcagaagcccggaaaggcccccaacctgttgatctacgccgcctcaaacctccaatccggggtgccgagccgcttcagcggctccggttcgggtgccgatttcactctgaccatctcctccctgcaacctgaagatgtggctacctactactgccaaaagtacaactccgcaccttttactttcggaccggggaccaaagtggacattaag

SEQ ID NO: 1089 - protein, 123 aa, Artificial Sequence
  source: /note="Description of Artificial Sequence: Synthetic polypeptide"
QVQLQESGPGLVKPSQTLSLTCTVSGGSISSGGYYWSWIRQHPGKGLEWIGYIYYSGSTYYNPSLKSRVTISVDTSKNQFSLKLSSVTAADTAVYYCARAGIAARLRGAFDIWGQGTMVTVSS

SEQ ID NO: 1090 - protein, 107 aa, Artificial Sequence
  source: /note="Description of Artificial Sequence: Synthetic polypeptide"
DIVMTQSPSSVSASVGDRVIITCRASQGIRNWLAWYQQKPGKAPNLLIYAASNLQSGVPSRFSGSGSGADFTLTISSLQPEDVATYYCQKYNSAPFTFGPGTKVDIK

SEQ ID NO: 1091 - protein, 489 aa, Artificial Sequence
  source: /note="Description of Artificial Sequence: Synthetic polypeptide"
MALPVTALLLPLALLLHAARPQVQLQESGPGLVKPSQTLSLTCTVSGGSISSGGYYWSWIRQHPGKGLEWIGYIYYSGSTYYNPSLKSRVTISVDTSKNQFSLKLSSVTAADTAVYYCARAGIAARLRGAFDIWGQGTMVTVSSGGGGSGGGGSGGGGSDIVMTQSPSSVSASVGDRVIITCRASQGIRNWLAWYQQKPGKAPNLLIYAASNLQSGVPSRFSGSGSGADFTLTISSLQPEDVATYYCQKYNSAPFTFGPGTKVDIKTTTPAPRPPTPAPTIASQPLSLRPEACRPAAGGAVHTRGLDFACDIYIWAPLAGTCGVLLLSLVITLYCKRGRKKLLYIFKQPFMRPVQTTQEEDGCSCRFPEEEEGGCELRVKFSRSADAPAYKQGQNQLYNELNLGRREEYDVLDKRRGRDPEMGGKPRRKNPQEGLYNELQKDKMAEAYSEIGMKGERRRGKGHDGLYQGLSTATKDTYDALHMQALPPR

SEQ ID NO: 1092 - DNA, 1467 bp, Artificial Sequence
  source: /note="Description of Artificial Sequence: Synthetic polynucleotide"
atggccctccctgtcaccgccctgctgcttccgctggctcttctgctccacgccgctcggccccaagtgcagcttcaggagagcggcccgggactcgtgaagccgtcccagaccctgtccctgacttgcaccgtgtcgggaggaagcatctcgagcggaggctactattggtcgtggattcggcagcaccctggaaagggcctggaatggatcggctacatctactactccggctcgacctactacaacccatcgctgaagtccagagtgacaatctcagtggacacgtccaagaatcagttcagcctgaagctctcttccgtgactgcggccgacaccgccgtgtactactgcgcacgcgctggaattgccgcccggctgaggggtgccttcgacatttggggacagggcaccatggtcaccgtgtcctccggcggcggaggttccgggggtggaggctcaggaggaggggggtccgacatcgtcatgactcagtcgccctcaagcgtcagcgcgtccgtcggggacagagtgatcatcacctgtcgggcgtcccagggaattcgcaactggctggcctggtatcagcagaagcccggaaaggcccccaacctgttgatctacgccgcctcaaacctccaatccggggtgccgagccgcttcagcggctccggttcgggtgccgatttcactctgaccatctcctccctgcaacctgaagatgtggctacctactactgccaaaagtacaactccgcaccttttactttcggaccggggaccaaagtggacattaagaccactaccccagcaccgaggccacccaccccggctcctaccatcgcctcccagcctctgtccctgcgtccggaggcatgtagacccgcagctggtggggccgtgcatacccggggtcttgacttcgcctgcgatatctacatttgggcccctctggctggtacttgcggggtcctgctgctttcactcgtgatcactctttactgtaagcgcggtcggaagaagctgctgtacatctttaagcaacccttcatgaggcctgtgcagactactcaagaggaggacggctgttcatgccggttcccagaggaggaggaaggcggctgcgaactgcgcgtgaaattcagccgcagcgcagatgctccagcctacaagcaggggcagaaccagctctacaacgaactcaatcttggtcggagagaggagtacgacgtgctggacaagcggagaggacgggacccagaaatgggcgggaagccgcgcagaaagaatccccaagagggcctgtacaacgagctccaaaaggataagatggcagaagcctatagcgagattggtatgaaaggggaacgcagaagaggcaaaggccacgacggactgtaccagggactcagcaccgccaccaaggacacctatgacgctcttcacatgcaggccctgccgcctcgg

SEQ ID NO: 1093 - protein, 253 aa, Artificial Sequence
  source: /note="Description of Artificial Sequence: Synthetic polypeptide"
QVQLVQSGAEVKKPGSSVKVSCKASGGTFSSYAISWVRQAPGQGLEWMGGIIPIFGTANYAQKFQGRVTITADESTSTAYMELSSLRSEDTAVYYCARRGGYQLLRWDVGLLRSAFDIWGQGTMVTVSSGGGGSGGGGSGGGGSSYVLTQPPSVSVAPGQTARITCGGNNIGSKSVHWYQQKPGQAPVLVLYGKNNRPSGVPDRFSGSRSGTTASLTITGAQAEDEADYYCSSRDSSGDHLRVFGTGTKVTVL

SEQ ID NO: 1094 - DNA, 759 bp, Artificial Sequence
  source: /note="Description of Artificial Sequence: Synthetic polynucleotide"
caagtgcagctggtccagtcgggcgccgaggtcaagaagcccgggagctctgtgaaagtgtcctgcaaggcctccgggggcacctttagctcctacgccatctcctgggtccgccaagcaccgggtcaaggcctggagtggatggggggaattatccctatcttcggcactgccaactacgcccagaagttccagggacgcgtgaccattaccgcggacgaatccacctccaccgcttatatggagctgtccagcttgcgctcggaagataccgccgtgtactactgcgcccggaggggtggataccagctgctgagatgggacgtgggcctcctgcggtcggcgttcgacatctggggccagggcactatggtcactgtgtccagcggaggaggcggatcgggaggcggcggatcagggggaggcggttccagctacgtgcttactcaacccccttcggtgtccgtggccccgggacagaccgccagaatcacttgcggaggaaacaacattgggtccaagagcgtgcattggtaccagcagaagccaggacaggcccctgtgctggtgctctacgggaagaacaatcggcccagcggagtgccggacaggttctcgggttcacgctccggtacaaccgcttcactgactatcaccggggcccaggcagaggatgaagcggactactactgttcctcccgggattcatccggcgaccacctccgggtgttcggaaccggaacgaaggtcaccgtgctg

SEQ ID NO: 1095 - protein, 129 aa, Artificial Sequence
  source: /note="Description of Artificial Sequence: Synthetic polypeptide"
QVQLVQSGAEVKKPGSSVKVSCKASGGTFSSYAISWVRQAPGQGLEWMGGIIPIFGTANYAQKFQGRVTITADESTSTAYMELSSLRSEDTAVYYCARRGGYQLLRWDVGLLRSAFDIWGQGTMVTVSS

SEQ ID NO: 1096 - protein, 109 aa, Artificial Sequence
  source: /note="Description of Artificial Sequence: Synthetic polypeptide"
SYVLTQPPSVSVAPGQTARITCGGNNIGSKSVHWYQQKPGQAPVLVLYGKNNRPSGVPDRFSGSRSGTTASLTITGAQAEDEADYYCSSRDSSGDHLRVFGTGTKVTVL

SEQ ID NO: 1097 - protein, 497 aa, Artificial Sequence
  source: /note="Description of Artificial Sequence: Synthetic polypeptide"
MALPVTALLLPLALLLHAARPQVQLVQSGAEVKKPGSSVKVSCKASGGTFSSYAISWVRQAPGQGLEWMGGIIPIFGTANYAQKFQGRVTITADESTSTAYMELSSLRSEDTAVYYCARRGGYQLLRWDVGLLRSAFDIWGQGTMVTVSSGGGGSGGGGSGGGGSSYVLTQPPSVSVAPGQTARITCGGNNIGSKSVHWYQQKPGQAPVLVLYGKNNRPSGVPDRFSGSRSGTTASLTITGAQAEDEADYYCSSRDSSGDHLRVFGTGTKVTVLTTTPAPRPPTPAPTIASQPLSLRPEACRPAAGGAVHTRGLDFACDIYIWAPLAGTCGVLLLSLVITLYCKRGRKKLLYIFKQPFMRPVQTTQEEDGCSCRFPEEEEGGCELRVKFSRSADAPAYKQGQNQLYNELNLGRREEYDVLDKRRGRDPEMGGKPRRKNPQEGLYNELQKDKMAEAYSEIGMKGERRRGKGHDGLYQGLSTATKDTYDALHMQALPPR

SEQ ID NO: 1098 - DNA, 1491 bp, Artificial Sequence
  source: /note="Description of Artificial Sequence: Synthetic polynucleotide"
atggccctccctgtcaccgccctgctgcttccgctggctcttctgctccacgccgctcggccccaagtgcagctggtccagtcgggcgccgaggtcaagaagcccgggagctctgtgaaagtgtcctgcaaggcctccgggggcacctttagctcctacgccatctcctgggtccgccaagcaccgggtcaaggcctggagtggatggggggaattatccctatcttcggcactgccaactacgcccagaagttccagggacgcgtgaccattaccgcggacgaatccacctccaccgcttatatggagctgtccagcttgcgctcggaagataccgccgtgtactactgcgcccggaggggtggataccagctgctgagatgggacgtgggcctcctgcggtcggcgttcgacatctggggccagggcactatggtcactgtgtccagcggaggaggcggatcgggaggcggcggatcagggggaggcggttccagctacgtgcttactcaacccccttcggtgtccgtggccccgggacagaccgccagaatcacttgcggaggaaacaacattgggtccaagagcgtgcattggtaccagcagaagccaggacaggcccctgtgctggtgctctacgggaagaacaatcggcccagcggagtgccggacaggttctcgggttcacgctccggtacaaccgcttcactgactatcaccggggcccaggcagaggatgaagcggactactactgttcctcccgggattcatccggcgaccacctccgggtgttcggaaccggaacgaaggtcaccgtgctgaccactaccccagcaccgaggccacccaccccggctcctaccatcgcctcccagcctctgtccctgcgtccggaggcatgtagacccgcagctggtggggccgtgcatacccggggtcttgacttcgcctgcgatatctacatttgggcccctctggctggtacttgcggggtcctgctgctttcactcgtgatcactctttactgtaagcgcggtcggaagaagctgctgtacatctttaagcaacccttcatgaggcctgtgcagactactcaagaggaggacggctgttcatgccggttcccagaggaggaggaaggcggctgcgaactgcgcgtgaaattcagccgcagcgcagatgctccagcctacaagcaggggcagaaccagctctacaacgaactcaatcttggtcggagagaggagtacgacgtgctggacaagcggagaggacgggacccagaaatgggcgggaagccgcgcagaaagaatccccaagagggcctgtacaacgagctccaaaaggataagatggcagaagcctatagcgagattggtatgaaaggggaacgcagaagaggcaaaggccacgacggactgtaccagggactcagcaccgccaccaaggacacctatgacgctcttcacatgcaggccctgccgcctcgg

SEQ ID NO: 1099 - protein, 248 aa, Artificial Sequence
  source: /note="Description of Artificial Sequence: Synthetic polypeptide"
EVQLQQSGPGLVKPSQTLSLTCAISGDSVSSNSAAWNWIRQSPSRGLEWLGRTYYRSKWYSFYAISLKSRIIINPDTSKNQFSLQLKSVTPEDTAVYYCARSSPEGLFLYWFDPWGQGTLVTVSSGGDGSGGGGSGGGGSSSELTQDPAVSVALGQTIRITCQGDSLGNYYATWYQQKPGQAPVLVIYGTNNRPSGIPDRFSASSSGNTASLTITGAQAEDEADYYCNSRDSSGHHLLFGTGTKVTVL

SEQ ID NO: 1100 - DNA, 744 bp, Artificial Sequence
  source: /note="Description of Artificial Sequence: Synthetic polynucleotide"
gaagtgcagctccaacagtcaggaccggggctcgtgaagccatcccagaccctgtccctgacttgtgccatctcgggagatagcgtgtcatcgaactccgccgcctggaactggattcggcagagcccgtcccgcggactggagtggcttggaaggacctactaccggtccaagtggtactctttctacgcgatctcgctgaagtcccgcattatcattaaccctgatacctccaagaatcagttctccctccaactgaaatccgtcacccccgaggacacagcagtgtattactgcgcacggagcagccccgaaggactgttcctgtattggtttgacccctggggccaggggactcttgtgaccgtgtcgagcggcggagatgggtccggtggcggtggttcggggggcggcggatcatcatccgaactgacccaggacccggctgtgtccgtggcgctgggacaaaccatccgcattacgtgccagggagactccctgggcaactactacgccacttggtaccagcagaagccgggccaagcccctgtgttggtcatctacgggaccaacaacagaccttccggcatccccgaccggttcagcgcttcgtcctccggcaacactgccagcctgaccatcactggagcgcaggccgaagatgaggccgactactactgcaacagcagagactcctcgggtcatcacctcttgttcggaactggaaccaaggtcaccgtgctg

SEQ ID NO: 1101 - protein, 125 aa, Artificial Sequence
  source: /note="Description of Artificial Sequence: Synthetic polypeptide"
EVQLQQSGPGLVKPSQTLSLTCAISGDSVSSNSAAWNWIRQSPSRGLEWLGRTYYRSKWYSFYAISLKSRIIINPDTSKNQFSLQLKSVTPEDTAVYYCARSSPEGLFLYWFDPWGQGTLVTVSS

SEQ ID NO: 1102 - protein, 108 aa, Artificial Sequence
  source: /note="Description of Artificial Sequence: Synthetic polypeptide"
SSELTQDPAVSVALGQTIRITCQGDSLGNYYATWYQQKPGQAPVLVIYGTNNRPSGIPDRFSASSSGNTASLTITGAQAEDEADYYCNSRDSSGHHLLFGTGTKVTVL

SEQ ID NO: 1103 - protein, 492 aa, Artificial Sequence
  source: /note="Description of Artificial Sequence: Synthetic polypeptide"
MALPVTALLLPLALLLHAARPEVQLQQSGPGLVKPSQTLSLTCAISGDSVSSNSAAWNWIRQSPSRGLEWLGRTYYRSKWYSFYAISLKSRIIINPDTSKNQFSLQLKSVTPEDTAVYYCARSSPEGLFLYWFDPWGQGTLVTVSSGGDGSGGGGSGGGGSSSELTQDPAVSVALGQTIRITCQGDSLGNYYATWYQQKPGQAPVLVIYGTNNRPSGIPDRFSASSSGNTASLTITGAQAEDEADYYCNSRDSSGHHLLFGTGTKVTVLTTTPAPRPPTPAPTIASQPLSLRPEACRPAAGGAVHTRGLDFACDIYIWAPLAGTCGVLLLSLVITLYCKRGRKKLLYIFKQPFMRPVQTTQEEDGCSCRFPEEEEGGCELRVKFSRSADAPAYKQGQNQLYNELNLGRREEYDVLDKRRGRDPEMGGKPRRKNPQEGLYNELQKDKMAEAYSEIGMKGERRRGKGHDGLYQGLSTATKDTYDALHMQALPPR

SEQ ID NO: 1104 - DNA, 1476 bp, Artificial Sequence
  source: /note="Description of Artificial Sequence: Synthetic polynucleotide"
atggccctccctgtcaccgccctgctgcttccgctggctcttctgctccacgccgctcggcccgaagtgcagctccaacagtcaggaccggggctcgtgaagccatcccagaccctgtccctgacttgtgccatctcgggagatagcgtgtcatcgaactccgccgcctggaactggattcggcagagcccgtcccgcggactggagtggcttggaaggacctactaccggtccaagtggtactctttctacgcgatctcgctgaagtcccgcattatcattaaccctgatacctccaagaatcagttctccctccaactgaaatccgtcacccccgaggacacagcagtgtattactgcgcacggagcagccccgaaggactgttcctgtattggtttgacccctggggccaggggactcttgtgaccgtgtcgagcggcggagatgggtccggtggcggtggttcggggggcggcggatcatcatccgaactgacccaggacccggctgtgtccgtggcgctgggacaaaccatccgcattacgtgccagggagactccctgggcaactactacgccacttggtaccagcagaagccgggccaagcccctgtgttggtcatctacgggaccaacaacagaccttccggcatccccgaccggttcagcgcttcgtcctccggcaacactgccagcctgaccatcactggagcgcaggccgaagatgaggccgactactactgcaacagcagagactcctcgggtcatcacctcttgttcggaactggaaccaaggtcaccgtgctgaccactaccccagcaccgaggccacccaccccggctcctaccatcgcctcccagcctctgtccctgcgtccggaggcatgtagacccgcagctggtggggccgtgcatacccggggtcttgacttcgcctgcgatatctacatttgggcccctctggctggtacttgcggggtcctgctgctttcactcgtgatcactctttactgtaagcgcggtcggaagaagctgctgtacatctttaagcaacccttcatgaggcctgtgcagactactcaagaggaggacggctgttcatgccggttcccagaggaggaggaaggcggctgcgaactgcgcgtgaaattcagccgcagcgcagatgctccagcctacaagcaggggcagaaccagctctacaacgaactcaatcttggtcggagagaggagtacgacgtgctggacaagcggagaggacgggacccagaaatgggcgggaagccgcgcagaaagaatccccaagagggcctgtacaacgagctccaaaaggataagatggcagaagcctatagcgagattggtatgaaaggggaacgcagaagaggcaaaggccacgacggactgtaccagggactcagcaccgccaccaaggacacctatgacgctcttcacatgcaggccctgccgcctcgg

SEQ ID NO: 1105 - protein, 246 aa, Artificial Sequence
  source: /note="Description of Artificial Sequence: Synthetic polypeptide"
EVQLVESGGGLVQPGGSLRLSCAASGFTFSSYAMSWVRQAPGKGLEWVSAISGSGGSTYYADSVKGRFTISRDNSKNTLYLQMNSLRAEDTAVYYCAKVEGSGSLDYWGQGTLVTVSSGGGGSGGGGSGGGGSEIVMTQSPGTLSLSPGERATLSCRASQSVSSAYLAWYQQKPGQPPRLLISGASTRATGIPDRFGGSGSGTDFTLTISRLEPEDFAVYYCQHYGSSFNGSSLFTFGQGTRLEIK

SEQ ID NO: 1106 - DNA, 738 bp, Artificial Sequence
  source: /note="Description of Artificial Sequence: Synthetic polynucleotide"
gaagtgcagctcgtggagtcaggaggcggcctggtccagccgggagggtcccttagactgtcatgcgccgcaagcggattcactttctcctcctatgccatgagctgggtccgccaagcccccggaaagggactggaatgggtgtccgccatctcggggtctggaggctcaacttactacgctgactccgtgaagggacggttcaccattagccgcgacaactccaagaacaccctctacctccaaatgaactccctgcgggccgaggataccgccgtctactactgcgccaaagtggaaggttcaggatcgctggactactggggacagggtactctcgtgaccgtgtcatcgggcggaggaggttccggcggtggcggctccggcggcggagggtcggagatcgtgatgacccagagccctggtactctgagcctttcgccgggagaaagggccaccctgtcctgccgcgcttcccaatccgtgtcctccgcgtacttggcgtggtaccagcagaagccgggacagccccctcggctgctgatcagcggggccagcacccgggcaaccggaatcccagacagattcgggggttccggcagcggcacagatttcaccctgactatttcgaggttggagcccgaggactttgcggtgtattactgtcagcactacgggtcgtcctttaatggctccagcctgttcacgttcggacaggggacccgcctggaaatcaag

SEQ ID NO: 1107 - protein, 118 aa, Artificial Sequence
  source: /note="Description of Artificial Sequence: Synthetic polypeptide"
EVQLVESGGGLVQPGGSLRLSCAASGFTFSSYAMSWVRQAPGKGLEWVSAISGSGGSTYYADSVKGRFTISRDNSKNTLYLQMNSLRAEDTAVYYCAKVEGSGSLDYWGQGTLVTVSS

SEQ ID NO: 1108 - protein, 113 aa, Artificial Sequence
  source: /note="Description of Artificial Sequence: Synthetic polypeptide"
EIVMTQSPGTLSLSPGERATLSCRASQSVSSAYLAWYQQKPGQPPRLLISGASTRATGIPDRFGGSGSGTDFTLTISRLEPEDFAVYYCQHYGSSFNGSSLFTFGQGTRLEIK

SEQ ID NO: 1109 - protein, 490 aa, Artificial Sequence
  source: /note="Description of Artificial Sequence: Synthetic polypeptide"
MALPVTALLLPLALLLHAARPEVQLVESGGGLVQPGGSLRLSCAASGFTFSSYAMSWVRQAPGKGLEWVSAISGSGGSTYYADSVKGRFTISRDNSKNTLYLQMNSLRAEDTAVYYCAKVEGSGSLDYWGQGTLVTVSSGGGGSGGGGSGGGGSEIVMTQSPGTLSLSPGERATLSCRASQSVSSAYLAWYQQKPGQPPRLLISGASTRATGIPDRFGGSGSGTDFTLTISRLEPEDFAVYYCQHYGSSFNGSSLFTFGQGTRLEIKTTTPAPRPPTPAPTIASQPLSLRPEACRPAAGGAVHTRGLDFACDIYIWAPLAGTCGVLLLSLVITLYCKRGRKKLLYIFKQPFMRPVQTTQEEDGCSCRFPEEEEGGCELRVKFSRSADAPAYKQGQNQLYNELNLGRREEYDVLDKRRGRDPEMGGKPRRKNPQEGLYNELQKDKMAEAYSEIGMKGERRRGKGHDGLYQGLSTATKDTYDALHMQALPPR

SEQ ID NO: 1110 - DNA, 1470 bp, Artificial Sequence
  source: /note="Description of Artificial Sequence: Synthetic polynucleotide"
atggccctccctgtcaccgccctgctgcttccgctggctcttctgctccacgccgctcggcccgaagtgcagctcgtggagtcaggaggcggcctggtccagccgggagggtcccttagactgtcatgcgccgcaagcggattcactttctcctcctatgccatgagctgggtccgccaagcccccggaaagggactggaatgggtgtccgccatctcggggtctggaggctcaacttactacgctgactccgtgaagggacggttcaccattagccgcgacaactccaagaacaccctctacctccaaatgaactccctgcgggccgaggataccgccgtctactactgcgccaaagtggaaggttcaggatcgctggactactggggacagggtactctcgtgaccgtgtcatcgggcggaggaggttccggcggtggcggctccggcggcggagggtcggagatcgtgatgacccagagccctggtactctgagcctttcgccgggagaaagggccaccctgtcctgccgcgcttcccaatccgtgtcctccgcgtacttggcgtggtaccagcagaagccgggacagccccctcggctgctgatcagcggggccagcacccgggcaaccggaatcccagacagattcgggggttccggcagcggcacagatttcaccctgactatttcgaggttggagcccgaggactttgcggtgtattactgtcagcactacgggtcgtcctttaatggctccagcctgttcacgttcggacaggggacccgcctggaaatcaagaccactaccccagcaccgaggccacccaccccggctcctaccatcgcctcccagcctctgtccctgcgtccggaggcatgtagacccgcagctggtggggccgtgcatacccggggtcttgacttcgcctgcgatatctacatttgggcccctctggctggtacttgcggggtcctgctgctttcactcgtgatcactctttactgtaagcgcggtcggaagaagctgctgtacatctttaagcaacccttcatgaggcctgtgcagactactcaagaggaggacggctgttcatgccggttcccagaggaggaggaaggcggctgcgaactgcgcgtgaaattcagccgcagcgcagatgctccagcctacaagcaggggcagaaccagctctacaacgaactcaatcttggtcggagagaggagtacgacgtgctggacaagcggagaggacgggacccagaaatgggcgggaagccgcgcagaaagaatccccaagagggcctgtacaacgagctccaaaaggataagatggcagaagcctatagcgagattggtatgaaaggggaacgcagaagaggcaaaggccacgacggactgtaccagggactcagcaccgccaccaaggacacctatgacgctcttcacatgcaggccctgccgcctcgg

SEQ ID NO: 1111 - protein, 241 aa, Artificial Sequence
  source: /note="Description of Artificial Sequence: Synthetic polypeptide"
EVQLVETGGGLVQPGGSLRLSCAASGITFSRYPMSWVRQAPGKGLEWVSGISDSGVSTYYADSAKGRFTISRDNSKNTLFLQMSSLRDEDTAVYYCVTRAGSEASDIWGQGTMVTVSSGGGGSGGGGSGGGGSEIVLTQSPATLSLSPGERATLSCRASQSVSNSLAWYQQKPGQAPRLLIYDASSRATGIPDRFSGSGSGTDFTLTISRLEPEDFAIYYCQQFGTSSGLTFGGGTKLEIK

SEQ ID NO: 1112 - DNA, 723 bp, Artificial Sequence
  source: /note="Description of Artificial Sequence: Synthetic polynucleotide"
gaagtgcaactggtggaaaccggtggcggcctggtgcagcctggaggatcattgaggctgtcatgcgcggccagcggtattaccttctcccggtaccccatgtcctgggtcagacaggccccggggaaagggcttgaatgggtgtccgggatctcggactccggtgtcagcacttactacgccgactccgccaagggacgcttcaccatttcccgggacaactcgaagaacaccctgttcctccaaatgagctccctccgggacgaggatactgcagtgtactactgcgtgacccgcgccgggtccgaggcgtctgacatttggggacagggcactatggtcaccgtgtcgtccggcggagggggctcgggaggcggtggcagcggaggaggagggtccgagatcgtgctgacccaatccccggccaccctctcgctgagccctggagaaagggcaaccttgtcctgtcgcgcgagccagtccgtgagcaactccctggcctggtaccagcagaagcccggacaggctccgagacttctgatctacgacgcttcgagccgggccactggaatccccgaccgcttttcggggtccggctcaggaaccgatttcaccctgacaatctcacggctggagccagaggatttcgccatctattactgccagcagttcggtacttcctccggcctgactttcggaggcggcacgaagctcgaaatcaag

SEQ ID NO: 1113 - protein, 118 aa, Artificial Sequence
  source: /note="Description of Artificial Sequence: Synthetic polypeptide"
EVQLVETGGGLVQPGGSLRLSCAASGITFSRYPMSWVRQAPGKGLEWVSGISDSGVSTYYADSAKGRFTISRDNSKNTLFLQMSSLRDEDTAVYYCVTRAGSEASDIWGQGTMVTVSS

SEQ ID NO: 1114 - protein, 108 aa, Artificial Sequence
  source: /note="Description of Artificial Sequence: Synthetic polypeptide"
EIVLTQSPATLSLSPGERATLSCRASQSVSNSLAWYQQKPGQAPRLLIYDASSRATGIPDRFSGSGSGTDFTLTISRLEPEDFAIYYCQQFGTSSGLTFGGGTKLEIK

SEQ ID NO: 1115 - protein, 485 aa, Artificial Sequence
  source: /note="Description of Artificial Sequence: Synthetic polypeptide"
MALPVTALLLPLALLLHAARPEVQLVETGGGLVQPGGSLRLSCAASGITFSRYPMSWVRQAPGKGLEWVSGISDSGVSTYYADSAKGRFTISRDNSKNTLFLQMSSLRDEDTAVYYCVTRAGSEASDIWGQGTMVTVSSGGGGSGGGGSGGGGSEIVLTQSPATLSLSPGERATLSCRASQSVSNSLAWYQQKPGQAPRLLIYDASSRATGIPDRFSGSGSGTDFTLTISRLEPEDFAIYYCQQFGTSSGLTFGGGTKLEIKTTTPAPRPPTPAPTIASQPLSLRPEACRPAAGGAVHTRGLDFACDIYIWAPLAGTCGVLLLSLVITLYCKRGRKKLLYIFKQPFMRPVQTTQEEDGCSCRFPEEEEGGCELRVKFSRSADAPAYKQGQNQLYNELNLGRREEYDVLDKRRGRDPEMGGKPRRKNPQEGLYNELQKDKMAEAYSEIGMKGERRRGKGHDGLYQGLSTATKDTYDALHMQALPPR

SEQ ID NO: 1116 - DNA, 1455 bp, Artificial Sequence
  source: /note="Description of Artificial Sequence: Synthetic polynucleotide"
atggccctccctgtcaccgccctgctgcttccgctggctcttctgctccacgccgctcggcccgaagtgcaactggtggaaaccggtggcggcctggtgcagcctggaggatcattgaggctgtcatgcgcggccagcggtattaccttctcccggtaccccatgtcctgggtcagacaggccccggggaaagggcttgaatgggtgtccgggatctcggactccggtgtcagcacttactacgccgactccgccaagggacgcttcaccatttcccgggacaactcgaagaacaccctgttcctccaaatgagctccctccgggacgaggatactgcagtgtactactgcgtgacccgcgccgggtccgaggcgtctgacatttggggacagggcactatggtcaccgtgtcgtccggcggagggggctcgggaggcggtggcagcggaggaggagggtccgagatcgtgctgacccaatccccggccaccctctcgctgagccctggagaaagggcaaccttgtcctgtcgcgcgagccagtccgtgagcaactccctggcctggtaccagcagaagcccggacaggctccgagacttctgatctacgacgcttcgagccgggccactggaatccccgaccgcttttcggggtccggctcaggaaccgatttcaccctgacaatctcacggctggagccagaggatttcgccatctattactgccagcagttcggtacttcctccggcctgactttcggaggcggcacgaagctcgaaatcaagaccactaccccagcaccgaggccacccaccccggctcctaccatcgcctcccagcctctgtccctgcgtccggaggcatgtagacccgcagctggtggggccgtgcatacccggggtcttgacttcgcctgcgatatctacatttgggcccctctggctggtacttgcggggtcctgctgctttcactcgtgatcactctttactgtaagcgcggtcggaagaagctgctgtacatctttaagcaacccttcatgaggcctgtgcagactactcaagaggaggacggctgttcatgccggttcccagaggaggaggaaggcggctgcgaactgcgcgtgaaattcagccgcagcgcagatgctccagcctacaagcaggggcagaaccagctctacaacgaactcaatcttggtcggagagaggagtacgacgtgctggacaagcggagaggacgggacccagaaatgggcgggaagccgcgcagaaagaatccccaagagggcctgtacaacgagctccaaaaggataagatggcagaagcctatagcgagattggtatgaaaggggaacgcagaagaggcaaaggccacgacggactgtaccagggactcagcaccgccaccaaggacacctatgacgctcttcacatgcaggccctgccgcctcgg

SEQ ID NO: 1117 - protein, 248 aa, Artificial Sequence
  source: /note="Description of Artificial Sequence: Synthetic polypeptide"
QVQLVESGGGLVQPGGSLRLSCAASGFTFSSYAMSWVRQAPGKGLEWVSAISGSGGSTYYADSVKGRFTISRDNAKNSLYLQMNSLRAEDTAIYYCARATYKRELRYYYGMDVWGQGTMVTVSSGGGGSGGGGSGGGGSEIVMTQSPGTVSLSPGERATLSCRASQSVSSSFLAWYQQKPGQAPRLLIYGASSRATGIPDRFSGSGSGTDFTLTISRLEPEDSAVYYCQQYHSSPSWTFGQGTRLEIK

SEQ ID NO: 1118 - DNA, 744 bp, Artificial Sequence
  source: /note="Description of Artificial Sequence: Synthetic polynucleotide"
caagtgcagctcgtggaatcgggtggcggactggtgcagccggggggctcacttagactgtcctgcgcggccagcggattcactttctcctcctacgccatgtcctgggtcagacaggcccctggaaagggcctggaatgggtgtccgcaatcagcggcagcggcggctcgacctattacgcggattcagtgaagggcagattcaccatttcccgggacaacgccaagaactccttgtaccttcaaatgaactccctccgcgcggaagataccgcaatctactactgcgctcgggccacttacaagagggaactgcgctactactacgggatggacgtctggggccagggaaccatggtcaccgtgtccagcggaggaggaggatcgggaggaggcggtagcgggggtggagggtcggagatcgtgatgacccagtcccccggcactgtgtcgctgtcccccggcgaacgggccaccctgtcatgtcgggccagccagtcagtgtcgtcaagcttcctcgcctggtaccagcagaaaccgggacaagctccccgcctgctgatctacggagccagcagccgggccaccggtattcctgaccggttctccggttcggggtccgggaccgactttactctgactatctctcgcctcgagccagaggactccgccgtgtattactgccagcagtaccactcctccccgtcctggacgttcggacagggcacaaggctggagattaag

SEQ ID NO: 1119 - protein, 124 aa, Artificial Sequence
  source: /note="Description of Artificial Sequence: Synthetic polypeptide"
QVQLVESGGGLVQPGGSLRLSCAASGFTFSSYAMSWVRQAPGKGLEWVSAISGSGGSTYYADSVKGRFTISRDNAKNSLYLQMNSLRAEDTAIYYCARATYKRELRYYYGMDVWGQGTMVTVSS

SEQ ID NO: 1120 - protein, 109 aa, Artificial Sequence
  source: /note="Description of Artificial Sequence: Synthetic polypeptide"
EIVMTQSPGTVSLSPGERATLSCRASQSVSSSFLAWYQQKPGQAPRLLIYGASSRATGIPDRFSGSGSGTDFTLTISRLEPEDSAVYYCQQYHSSPSWTFGQGTRLEIK

SEQ ID NO: 1121 - protein, 492 aa, Artificial Sequence
  source: /note="Description of Artificial Sequence: Synthetic polypeptide"
MALPVTALLLPLALLLHAARPQVQLVESGGGLVQPGGSLRLSCAASGFTFSSYAMSWVRQAPGKGLEWVSAISGSGGSTYYADSVKGRFTISRDNAKNSLYLQMNSLRAEDTAIYYCARATYKRELRYYYGMDVWGQGTMVTVSSGGGGSGGGGSGGGGSEIVMTQSPGTVSLSPGERATLSCRASQSVSSSFLAWYQQKPGQAPRLLIYGASSRATGIPDRFSGSGSGTDFTLTISRLEPEDSAVYYCQQYHSSPSWTFGQGTRLEIKTTTPAPRPPTPAPTIASQPLSLRPEACRPAAGGAVHTRGLDFACDIYIWAPLAGTCGVLLLSLVITLYCKRGRKKLLYIFKQPFMRPVQTTQEEDGCSCRFPEEEEGGCELRVKFSRSADAPAYKQGQNQLYNELNLGRREEYDVLDKRRGRDPEMGGKPRRKNPQEGLYNELQKDKMAEAYSEIGMKGERRRGKGHDGLYQGLSTATKDTYDALHMQALPPR

SEQ ID NO: 1122 - DNA, 1476 bp, Artificial Sequence
  source: /note="Description of Artificial Sequence: Synthetic polynucleotide"
atggccctccctgtcaccgccctgctgcttccgctggctcttctgctccacgccgctcggccccaagtgcagctcgtggaatcgggtggcggactggtgcagccggggggctcacttagactgtcctgcgcggccagcggattcactttctcctcctacgccatgtcctgggtcagacaggcccctggaaagggcctggaatgggtgtccgcaatcagcggcagcggcggctcgacctattacgcggattcagtgaagggcagattcaccatttcccgggacaacgccaagaactccttgtaccttcaaatgaactccctccgcgcggaagataccgcaatctactactgcgctcgggccacttacaagagggaactgcgctactactacgggatggacgtctggggccagggaaccatggtcaccgtgtccagcggaggaggaggatcgggaggaggcggtagcgggggtggagggtcggagatcgtgatgacccagtcccccggcactgtgtcgctgtcccccggcgaacgggccaccctgtcatgtcgggccagccagtcagtgtcgtcaagcttcctcgcctggtaccagcagaaaccgggacaagctccccgcctgctgatctacggagccagcagccgggccaccggtattcctgaccggttctccggttcggggtccgggaccgactttactctgactatctctcgcctcgagccagaggactccgccgtgtattactgccagcagtaccactcctccccgtcctggacgttcggacagggcacaaggctggagattaagaccactaccccagcaccgaggccacccaccccggctcctaccatcgcctcccagcctctgtccctgcgtccggaggcatgtagacccgcagctggtggggccgtgcatacccggggtcttgacttcgcctgcgatatctacatttgggcccctctggctggtacttgcggggtcctgctgctttcactcgtgatcactctttactgtaagcgcggtcggaagaagctgctgtacatctttaagcaacccttcatgaggcctgtgcagactactcaagaggaggacggctgttcatgccggttcccagaggaggaggaaggcggctgcgaactgcgcgtgaaattcagccgcagcgcagatgctccagcctacaagcaggggcagaaccagctctacaacgaactcaatcttggtcggagagaggagtacgacgtgctggacaagcggagaggacgggacccagaaatgggcgggaagccgcgcagaaagaatccccaagagggcctgtacaacgagctccaaaaggataagatggcagaagcctatagcgagattggtatgaaaggggaacgcagaagaggcaaaggccacgacggactgtaccagggactcagcaccgccaccaaggacacctatgacgctcttcacatgcaggccctgccgcctcgg

SEQ ID NO: 1123 - protein, 248 aa, Artificial Sequence
  source: /note="Description of Artificial Sequence: Synthetic polypeptide"
EVQLVETGGGLVQPGGSLRLSCAASGFTFSSYAMSWVRQAPGKGLEWVSAISGSGGSTYYADSVKGRFTISRDNSKNTLYLQMNTLKAEDTAVYYCARATYKRELRYYYGMDVWGQGTTVTVSSGGGGSGGGGSGGGGSEIVLTQSPSTLSLSPGESATLSCRASQSVSTTFLAWYQQKPGQAPRLLIYGSSNRATGIPDRFSGSGSGTDFTLTIRRLEPEDFAVYYCQQYHSSPSWTFGQGTKVEIK

SEQ ID NO: 1124 - DNA, 744 bp, Artificial Sequence
  source: /note="Description of Artificial Sequence: Synthetic polynucleotide"
gaggtgcagcttgtggaaaccggtggcggactggtgcagcccggaggaagcctcaggctgtcctgcgccgcgtccggcttcaccttctcctcgtacgccatgtcctgggtccgccaggcccccggaaagggcctggaatgggtgtccgccatctctggaagcggaggttccacgtactacgcggacagcgtcaagggaaggttcacaatctcccgcgataattcgaagaacactctgtaccttcaaatgaacaccctgaaggccgaggacactgctgtgtactactgcgcacgggccacctacaagagagagctccggtactactacggaatggacgtctggggccagggaactactgtgaccgtgtcctcgggagggggtggctccggggggggcggctccggcggaggcggttccgagattgtgctgacccagtcaccttcaactctgtcgctgtccccgggagagagcgctactctgagctgccgggccagccagtccgtgtccaccaccttcctcgcctggtatcagcagaagccggggcaggcaccacggctcttgatctacgggtcaagcaacagagcgaccggaattcctgaccgcttctcggggagcggttcaggcaccgacttcaccctgactatccggcgcctggaacccgaagatttcgccgtgtattactgtcaacagtaccactcctcgccgtcctggacctttggccaaggaaccaaagtggaaatcaag

SEQ ID NO: 1125 - protein, 124 aa, Artificial Sequence
  source: /note="Description of Artificial Sequence: Synthetic polypeptide"
EVQLVETGGGLVQPGGSLRLSCAASGFTFSSYAMSWVRQAPGKGLEWVSAISGSGGSTYYADSVKGRFTISRDNSKNTLYLQMNTLKAEDTAVYYCARATYKRELRYYYGMDVWGQGTTVTVSS

SEQ ID NO: 1126 - protein, 109 aa, Artificial Sequence
  source: /note="Description of Artificial Sequence: Synthetic polypeptide"
EIVLTQSPSTLSLSPGESATLSCRASQSVSTTFLAWYQQKPGQAPRLLIYGSSNRATGIPDRFSGSGSGTDFTLTIRRLEPEDFAVYYCQQYHSSPSWTFGQGTKVEIK

SEQ ID NO: 1127 - protein, 492 aa, Artificial Sequence
  source: /note="Description of Artificial Sequence: Synthetic polypeptide"
MALPVTALLLPLALLLHAARPEVQLVETGGGLVQPGGSLRLSCAASGFTFSSYAMSWVRQAPGKGLEWVSAISGSGGSTYYADSVKGRFTISRDNSKNTLYLQMNTLKAEDTAVYYCARATYKRELRYYYGMDVWGQGTTVTVSSGGGGSGGGGSGGGGSEIVLTQSPSTLSLSPGESATLSCRASQSVSTTFLAWYQQKPGQAPRLLIYGSSNRATGIPDRFSGSGSGTDFTLTIRRLEPEDFAVYYCQQYHSSPSWTFGQGTKVEIKTTTPAPRPPTPAPTIASQPLSLRPEACRPAAGGAVHTRGLDFACDIYIWAPLAGTCGVLLLSLVITLYCKRGRKKLLYIFKQPFMRPVQTTQEEDGCSCRFPEEEEGGCELRVKFSRSADAPAYKQGQNQLYNELNLGRREEYDVLDKRRGRDPEMGGKPRRKNPQEGLYNELQKDKMAEAYSEIGMKGERRRGKGHDGLYQGLSTATKDTYDALHMQALPPR

SEQ ID NO: 1128 - DNA, 1476 bp, Artificial Sequence
  source: /note="Description of Artificial Sequence: Synthetic polynucleotide"
atggccctccctgtcaccgccctgctgcttccgctggctcttctgctccacgccgctcggcccgaggtgcagcttgtggaaaccggtggcggactggtgcagcccggaggaagcctcaggctgtcctgcgccgcgtccggcttcaccttctcctcgtacgccatgtcctgggtccgccaggcccccggaaagggcctggaatgggtgtccgccatctctggaagcggaggttccacgtactacgcggacagcgtcaagggaaggttcacaatctcccgcgataattcgaagaacactctgtaccttcaaatgaacaccctgaaggccgaggacactgctgtgtactactgcgcacgggccacctacaagagagagctccggtactactacggaatggacgtctggggccagggaactactgtgaccgtgtcctcgggagggggtggctccggggggggcggctccggcggaggcggttccgagattgtgctgacccagtcaccttcaactctgtcgctgtccccgggagagagcgctactctgagctgccgggccagccagtccgtgtccaccaccttcctcgcctggtatcagcagaagccggggcaggcaccacggctcttgatctacgggtcaagcaacagagcgaccggaattcctgaccgcttctcggggagcggttcaggcaccgacttcaccctgactatccggcgcctggaacccgaagatttcgccgtgtattactgtcaacagtaccactcctcgccgtcctggacctttggccaaggaaccaaagtggaaatcaagaccactaccccagcaccgaggccacccaccccggctcctaccatcgcctcccagcctctgtccctgcgtccggaggcatgtagacccgcagctggtggggccgtgcatacccggggtcttgacttcgcctgcgatatctacatttgggcccctctggctggtacttgcggggtcctgctgctttcactcgtgatcactctttactgtaagcgcggtcggaagaagctgctgtacatctttaagcaacccttcatgaggcctgtgcagactactcaagaggaggacggctgttcatgccggttcccagaggaggaggaaggcggctgcgaactgcgcgtgaaattcagccgcagcgcagatgctccagcctacaagcaggggcagaaccagctctacaacgaactcaatcttggtcggagagaggagtacgacgtgctggacaagcggagaggacgggacccagaaatgggcgggaagccgcgcagaaagaatccccaagagggcctgtacaacgagctccaaaaggataagatggcagaagcctatagcgagattggtatgaaaggggaacgcagaagaggcaaaggccacgacggactgtaccagggactcagcaccgccaccaaggacacctatgacgctcttcacatgcaggccctgccgcctcgg

SEQ ID NO: 1129 - protein, 239 aa, Artificial Sequence
  source: /note="Description of Artificial Sequence: Synthetic polypeptide"
EVQLVETGGGLVQPGRSLRLSCAASGFTFDDYAMHWVRQAPGKGLEWVSGISWNSGSIGYADSVKGRFTISRDNAKNSLYLQMNSLRDEDTAVYYCARVGKAVPDVWGQGTTVTVSSGGGGSGGGGSGGGGSDIVMTQTPSSLSASVGDRVTITCRASQSISSYLNWYQQKPGKAPKLLIYAASSLQSGVPSRFSGSGSGTDFTLTISSLQPEDFATYYCQQSYSTPYSFGQGTRLEIK

SEQ ID NO: 1130 - DNA, 717 bp, Artificial Sequence
  source: /note="Description of Artificial Sequence: Synthetic polynucleotide"
gaagtgcagctcgtggaaactggaggtggactcgtgcagcctggacggtcgctgcggctgagctgcgctgcatccggcttcaccttcgacgattatgccatgcactgggtcagacaggcgccagggaagggacttgagtgggtgtccggtatcagctggaatagcggctcaatcggatacgcggactccgtgaagggaaggttcaccatttcccgcgacaacgccaagaactccctgtacttgcaaatgaacagcctccgggatgaggacactgccgtgtactactgcgcccgcgtcggaaaagctgtgcccgacgtctggggccagggaaccactgtgaccgtgtccagcggcgggggtggatcgggcggtggagggtccggtggagggggctcagatattgtgatgacccagaccccctcgtccctgtccgcctcggtcggcgaccgcgtgactatcacatgtagagcctcgcagagcatctccagctacctgaactggtatcagcagaagccggggaaggccccgaagctcctgatctacgcggcatcatcactgcaatcgggagtgccgagccggttttccgggtccggctccggcaccgacttcacgctgaccatttcttccctgcaacccgaggacttcgccacttactactgccagcagtcctactccaccccttactccttcggccaaggaaccaggctggaaatcaag

SEQ ID NO: 1131 - protein, 117 aa, Artificial Sequence
  source: /note="Description of Artificial Sequence: Synthetic polypeptide"
EVQLVETGGGLVQPGRSLRLSCAASGFTFDDYAMHWVRQAPGKGLEWVSGISWNSGSIGYADSVKGRFTISRDNAKNSLYLQMNSLRDEDTAVYYCARVGKAVPDVWGQGTTVTVSS

SEQ ID NO: 1132 - protein, 107 aa, Artificial Sequence
  source: /note="Description of Artificial Sequence: Synthetic polypeptide"
DIVMTQTPSSLSASVGDRVTITCRASQSISSYLNWYQQKPGKAPKLLIYAASSLQSGVPSRFSGSGSGTDFTLTISSLQPEDFATYYCQQSYSTPYSFGQGTRLEIK

SEQ ID NO: 1133 - protein, 483 aa, Artificial Sequence
  source: /note="Description of Artificial Sequence: Synthetic polypeptide"
MALPVTALLLPLALLLHAARPEVQLVETGGGLVQPGRSLRLSCAASGFTFDDYAMHWVRQAPGKGLEWVSGISWNSGSIGYADSVKGRFTISRDNAKNSLYLQMNSLRDEDTAVYYCARVGKAVPDVWGQGTTVTVSSGGGGSGGGGSGGGGSDIVMTQTPSSLSASVGDRVTITCRASQSISSYLNWYQQKPGKAPKLLIYAASSLQSGVPSRFSGSGSGTDFTLTISSLQPEDFATYYCQQSYSTPYSFGQGTRLEIKTTTPAPRPPTPAPTIASQPLSLRPEACRPAAGGAVHTRGLDFACDIYIWAPLAGTCGVLLLSLVITLYCKRGRKKLLYIFKQPFMRPVQTTQEEDGCSCRFPEEEEGGCELRVKFSRSADAPAYKQGQNQLYNELNLGRREEYDVLDKRRGRDPEMGGKPRRKNPQEGLYNELQKDKMAEAYSEIGMKGERRRGKGHDGLYQGLSTATKDTYDALHMQALPPR

SEQ ID NO: 1134 - DNA, 1449 bp, Artificial Sequence
  source: /note="Description of Artificial Sequence: Synthetic polynucleotide"
atggccctccctgtcaccgccctgctgcttccgctggctcttctgctccacgccgctcggcccgaagtgcagctcgtggaaactggaggtggactcgtgcagcctggacggtcgctgcggctgagctgcgctgcatccggcttcaccttcgacgattatgccatgcactgggtcagacaggcgccagggaagggacttgagtgggtgtccggtatcagctggaatagcggctcaatcggatacgcggactccgtgaagggaaggttcaccatttcccgcgacaacgccaagaactccctgtacttgcaaatgaacagcctccgggatgaggacactgccgtgtactactgcgcccgcgtcggaaaagctgtgcccgacgtctggggccagggaaccactgtgaccgtgtccagcggcgggggtggatcgggcggtggagggtccggtggagggggctcagatattgtgatgacccagaccccctcgtccctgtccgcctcggtcggcgaccgcgtgactatcacatgtagagcctcgcagagcatctccagctacctgaactggtatcagcagaagccggggaaggccccgaagctcctgatctacgcggcatcatcactgcaatcgggagtgccgagccggttttccgggtccggctccggcaccgacttcacgctgaccatttcttccctgcaacccgaggacttcgccacttactactgccagcagtcctactccaccccttactccttcggccaaggaaccaggctggaaatcaagaccactaccccagcaccgaggccacccaccccggctcctaccatcgcctcccagcctctgtccctgcgtccggaggcatgtagacccgcagctggtggggccgtgcatacccggggtcttgacttcgcctgcgatatctacatttgggcccctctggctggtacttgcggggtcctgctgctttcactcgtgatcactctttactgtaagcgcggtcggaagaagctgctgtacatctttaagcaacccttcatgaggcctgtgcagactactcaagaggaggacggctgttcatgccggttcccagaggaggaggaaggcggctgcgaactgcgcgtgaaattcagccgcagcgcagatgctccagcctacaagcaggggcagaaccagctctacaacgaactcaatcttggtcggagagaggagtacgacgtgctggacaagcggagaggacgggacccagaaatgggcgggaagccgcgcagaaagaatccccaagagggcctgtacaacgagctccaaaaggataagatggcagaagcctatagcgagattggtatgaaaggggaacgcagaagaggcaaaggccacgacggactgtaccagggactcagcaccgccaccaaggacacctatgacgctcttcacatgcaggccctgccgcctcgg

SEQ ID NO: 1135 - protein, 246 aa, Artificial Sequence
  source: /note="Description of Artificial Sequence: Synthetic polypeptide"
EVQLVESGGGLVQPGRSLRLSCTASGFTFDDYAMHWVRQRPGKGLEWVASINWKGNSLAYGDSVKGRFAISRDNAKNTVFLQMNSLRTEDTAVYYCASHQGVAYYNYAMDVWGRGTLVTVSSGGGGSGGGGSGGGGSEIVLTQSPGTLSLSPGERATLSCRATQSIGSSFLAWYQQRPGQAPRLLIYGASQRATGIPDRFSGRGSGTDFTLTISRVEPEDSAVYYCQHYESSPSWTFGQGTKVEIK

SEQ ID NO: 1136 - DNA, 738 bp, Artificial Sequence
  source: /note="Description of Artificial Sequence: Synthetic polynucleotide"
gaagtgcagctcgtggagagcgggggaggattggtgcagcccggaaggtccctgcggctctcctgcactgcgtctggcttcaccttcgacgactacgcgatgcactgggtcagacagcgcccgggaaagggcctggaatgggtcgcctcaatcaactggaagggaaactccctggcctatggcgacagcgtgaagggccgcttcgccatttcgcgcgacaacgccaagaacaccgtgtttctgcaaatgaattccctgcggaccgaggataccgctgtgtactactgcgccagccaccagggcgtggcatactataactacgccatggacgtgtggggaagagggacgctcgtcaccgtgtcctccgggggcggtggatcgggtggaggaggaagcggtggcgggggcagcgaaatcgtgctgactcagagcccgggaactctttcactgtccccgggagaacgggccactctctcgtgccgggccacccagtccatcggctcctccttccttgcctggtaccagcagaggccaggacaggcgccccgcctgctgatctacggtgcttcccaacgcgccactggcattcctgaccggttcagcggcagagggtcgggaaccgatttcacactgaccatttcccgggtggagcccgaagattcggcagtctactactgtcagcattacgagtcctccccttcatggaccttcggtcaagggaccaaagtggagatcaag

SEQ ID NO: 1137 - protein, 122 aa, Artificial Sequence
  source: /note="Description of Artificial Sequence: Synthetic polypeptide"
EVQLVESGGGLVQPGRSLRLSCTASGFTFDDYAMHWVRQRPGKGLEWVASINWKGNSLAYGDSVKGRFAISRDNAKNTVFLQMNSLRTEDTAVYYCASHQGVAYYNYAMDVWGRGTLVTVSS

SEQ ID NO: 1138 - protein, 109 aa, Artificial Sequence
  source: /note="Description of Artificial Sequence: Synthetic polypeptide"
EIVLTQSPGTLSLSPGERATLSCRATQSIGSSFLAWYQQRPGQAPRLLIYGASQRATGIPDRFSGRGSGTDFTLTISRVEPEDSAVYYCQHYESSPSWTFGQGTKVEIK

SEQ ID NO: 1139 - protein, 490 aa, Artificial Sequence
  source: /note="Description of Artificial Sequence: Synthetic polypeptide"
MALPVTALLLPLALLLHAARPEVQLVESGGGLVQPGRSLRLSCTASGFTFDDYAMHWVRQRPGKGLEWVASINWKGNSLAYGDSVKGRFAISRDNAKNTVFLQMNSLRTEDTAVYYCASHQGVAYYNYAMDVWGRGTLVTVSSGGGGSGGGGSGGGGSEIVLTQSPGTLSLSPGERATLSCRATQSIGSSFLAWYQQRPGQAPRLLIYGASQRATGIPDRFSGRGSGTDFTLTISRVEPEDSAVYYCQHYESSPSWTFGQGTKVEIKTTTPAPRPPTPAPTIASQPLSLRPEACRPAAGGAVHTRGLDFACDIYIWAPLAGTCGVLLLSLVITLYCKRGRKKLLYIFKQPFMRPVQTTQEEDGCSCRFPEEEEGGCELRVKFSRSADAPAYKQGQNQLYNELNLGRREEYDVLDKRRGRDPEMGGKPRRKNPQEGLYNELQKDKMAEAYSEIGMKGERRRGKGHDGLYQGLSTATKDTYDALHMQALPPR

SEQ ID NO: 1140 - DNA, 1470 bp, Artificial Sequence
  source: /note="Description of Artificial Sequence: Synthetic polynucleotide"
atggccctccctgtcaccgccctgctgcttccgctggctcttctgctccacgccgctcggcccgaagtgcagctcgtggagagcgggggaggattggtgcagcccggaaggtccctgcggctctcctgcactgcgtctggcttcaccttcgacgactacgcgatgcactgggtcagacagcgcccgggaaagggcctggaatgggtcgcctcaatcaactggaagggaaactccctggcctatggcgacagcgtgaagggccgcttcgccatttcgcgcgacaacgccaagaacaccgtgtttctgcaaatgaattccctgcggaccgaggataccgctgtgtactactgcgccagccaccagggcgtggcatactataactacgccatggacgtgtggggaagagggacgctcgtcaccgtgtcctccgggggcggtggatcgggtggaggaggaagcggtggcgggggcagcgaaatcgtgctgactcagagcccgggaactctttcactgtccccgggagaacgggccactctctcgtgccgggccacccagtccatcggctcctccttccttgcctggtaccagcagaggccaggacaggcgccccgcctgctgatctacggtgcttcccaacgcgccactggcattcctgaccggttcagcggcagagggtcgggaaccgatttcacactgaccatttcccgggtggagcccgaagattcggcagtctactactgtcagcattacgagtcctccccttcatggaccttcggtcaagggaccaaagtggagatcaagaccactaccccagcaccgaggccacccaccccggctcctaccatcgcctcccagcctctgtccctgcgtccggaggcatgtagacccgcagctggtggggccgtgcatacccggggtcttgacttcgcctgcgatatctacatttgggcccctctggctggtacttgcggggtcctgctgctttcactcgtgatcactctttactgtaagcgcggtcggaagaagctgctgtacatctttaagcaacccttcatgaggcctgtgcagactactcaagaggaggacggctgttcatgccggttcccagaggaggaggaaggcggctgcgaactgcgcgtgaaattcagccgcagcgcagatgctccagcctacaagcaggggcagaaccagctctacaacgaactcaatcttggtcggagagaggagtacgacgtgctggacaagcggagaggacgggacccagaaatgggcgggaagccgcgcagaaagaatccccaagagggcctgtacaacgagctccaaaaggataagatggcagaagcctatagcgagattggtatgaaaggggaacgcagaagaggcaaaggccacgacggactgtaccagggactcagcaccgccaccaaggacacctatgacgctcttcacatgcaggccctgccgcctcgg

SEQ ID NO: 1141 - protein, 241 aa, Artificial Sequence
  source: /note="Description of Artificial Sequence: Synthetic polypeptide"
EVQLVESGGGLVQPGGSLRLSCAASGFTFSSYAMSWVRQAPGKGLEWVSAISGSGGSTYYADSVKGRFTISRDNSKNTLYLQMNSLRAEDTAVYYCAKVVRDGMDVWGQGTTVTVSSGGGGSGGGGSGGGGSEIVLTQSPATLSLSPGERATLSCRASQSVSSSYLAWYQQKPGQAPRLLIYGASSRATGIPDRFSGNGSGTDFTLTISRLEPEDFAVYYCQQYGSPPRFTFGPGTKVDIK

SEQ ID NO: 1142 - DNA, 723 bp, Artificial Sequence
  source: /note="Description of Artificial Sequence: Synthetic polynucleotide"
gaggtgcagttggtcgaaagcgggggcgggcttgtgcagcctggcggatcactgcggctgtcctgcgcggcatcaggcttcacgttttcttcctacgccatgtcctgggtgcgccaggcccctggaaagggactggaatgggtgtccgcgatttcggggtccggcgggagcacctactacgccgattccgtgaagggccgcttcactatctcgcgggacaactccaagaacaccctctacctccaaatgaatagcctgcgggccgaggataccgccgtctactattgcgctaaggtcgtgcgcgacggaatggacgtgtggggacagggtaccaccgtgacagtgtcctcggggggaggcggtagcggcggaggaggaagcggtggtggaggttccgagattgtgctgactcaatcacccgcgaccctgagcctgtcccccggcgaaagggccactctgtcctgtcgggccagccaatcagtctcctcctcgtacctggcctggtaccagcagaagccaggacaggctccgagactccttatctatggcgcatcctcccgcgccaccggaatcccggataggttctcgggaaacggatcggggaccgacttcactctcaccatctcccggctggaaccggaggacttcgccgtgtactactgccagcagtacggcagcccgcctagattcactttcggccccggcaccaaagtggacatcaag

SEQ ID NO: 1143 - protein, 117 aa, Artificial Sequence
  source: /note="Description of Artificial Sequence: Synthetic polypeptide"
EVQLVESGGGLVQPGGSLRLSCAASGFTFSSYAMSWVRQAPGKGLEWVSAISGSGGSTYYADSVKGRFTISRDNSKNTLYLQMNSLRAEDTAVYYCAKVVRDGMDVWGQGTTVTVSS

SEQ ID NO: 1144 - protein, 109 aa, Artificial Sequence
  source: /note="Description of Artificial Sequence: Synthetic polypeptide"
EIVLTQSPATLSLSPGERATLSCRASQSVSSSYLAWYQQKPGQAPRLLIYGASSRATGIPDRFSGNGSGTDFTLTISRLEPEDFAVYYCQQYGSPPRFTFGPGTKVDIK

SEQ ID NO: 1145 - protein, 485 aa, Artificial Sequence
  source: /note="Description of Artificial Sequence: Synthetic polypeptide"
MALPVTALLLPLALLLHAARPEVQLVESGGGLVQPGGSLRLSCAASGFTFSSYAMSWVRQAPGKGLEWVSAISGSGGSTYYADSVKGRFTISRDNSKNTLYLQMNSLRAEDTAVYYCAKVVRDGMDVWGQGTTVTVSSGGGGSGGGGSGGGGSEIVLTQSPATLSLSPGERATLSCRASQSVSSSYLAWYQQKPGQAPRLLIYGASSRATGIPDRFSGNGSGTDFTLTISRLEPEDFAVYYCQQYGSPPRFTFGPGTKVDIKTTTPAPRPPTPAPTIASQPLSLRPEACRPAAGGAVHTRGLDFACDIYIWAPLAGTCGVLLLSLVITLYCKRGRKKLLYIFKQPFMRPVQTTQEEDGCSCRFPEEEEGGCELRVKFSRSADAPAYKQGQNQLYNELNLGRREEYDVLDKRRGRDPEMGGKPRRKNPQEGLYNELQKDKMAEAYSEIGMKGERRRGKGHDGLYQGLSTATKDTYDALHMQALPPR

SEQ ID NO: 1146 - DNA, 1455 bp, Artificial Sequence
  source: /note="Description of Artificial Sequence: Synthetic polynucleotide"
atggccctccctgtcaccgccctgctgcttccgctggctcttctgctccacgccgctcggcccgaggtgcagttggtcgaaagcgggggcgggcttgtgcagcctggcggatcactgcggctgtcctgcgcggcatcaggcttcacgttttcttcctacgccatgtcctgggtgcgccaggcccctggaaagggactggaatgggtgtccgcgatttcggggtccggcgggagcacctactacgccgattccgtgaagggccgcttcactatctcgcgggacaactccaagaacaccctctacctccaaatgaatagcctgcgggccgaggataccgccgtctactattgcgctaaggtcgtgcgcgacggaatggacgtgtggggacagggtaccaccgtgacagtgtcctcggggggaggcggtagcggcggaggaggaagcggtggtggaggttccgagattgtgctgactcaatcacccgcgaccctgagcctgtcccccggcgaaagggccactctgtcctgtcgggccagccaatcagtctcctcctcgtacctggcctggtaccagcagaagccaggacaggctccgagactccttatctatggcgcatcctcccgcgccaccggaatcccggataggttctcgggaaacggatcggggaccgacttcactctcaccatctcccggctggaaccggaggacttcgccgtgtactactgccagcagtacggcagcccgcctagattcactttcggccccggcaccaaagtggacatcaagaccactaccccagcaccgaggccacccaccccggctcctaccatcgcctcccagcctctgtccctgcgtccggaggcatgtagacccgcagctggtggggccgtgcatacccggggtcttgacttcgcctgcgatatctacatttgggcccctctggctggtacttgcggggtcctgctgctttcactcgtgatcactctttactgtaagcgcggtcggaagaagctgctgtacatctttaagcaacccttcatgaggcctgtgcagactactcaagaggaggacggctgttcatgccggttcccagaggaggaggaaggcggctgcgaactgcgcgtgaaattcagccgcagcgcagatgctccagcctacaagcaggggcagaaccagctctacaacgaactcaatcttggtcggagagaggagtacgacgtgctggacaagcggagaggacgggacccagaaatgggcgggaagccgcgcagaaagaatccccaagagggcctgtacaacgagctccaaaaggataagatggcagaagcctatagcgagattggtatgaaaggggaacgcagaagaggcaaaggccacgacggactgtaccagggactcagcaccgccaccaaggacacctatgacgctcttcacatgcaggccctgccgcctcgg

SEQ ID NO: 1147 - protein, 242 aa, Artificial Sequence
  source: /note="Description of Artificial Sequence: Synthetic polypeptide"
EVQLLESGGGLVQPGGSLRLSCAASGFTFSSYAMSWVRQAPGKGLEWVSAISGSGGSTYYADSVKGRFTISRDNSKNTLYLQMNSLRAEDTAVYYCAKIPQTGTFDYWGQGTLVTVSSGGGGSGGGGSGGGGSEIVLTQSPGTLSLSPGERATLSCRASQSVSSSYLAWYQQRPGQAPRLLIYGASSRATGIPDRFSGSGSGTDFTLTISRLEPEDFAVYYCQHYGSSPSWTFGQGTRLEIK

SEQ ID NO: 1148 - DNA, 726 bp, Artificial Sequence
  source: /note="Description of Artificial Sequence: Synthetic polynucleotide"
gaagtgcagctgctggagtccggcggtggattggtgcaaccggggggatcgctcagactgtcctgtgcggcgtcaggcttcaccttctcgagctacgccatgtcatgggtcagacaggcccctggaaagggtctggaatgggtgtccgccatttccgggagcgggggatctacatactacgccgatagcgtgaagggccgcttcaccatttcccgggacaactccaagaacactctctatctgcaaatgaactccctccgcgctgaggacactgccgtgtactactgcgccaaaatccctcagaccggcaccttcgactactggggacaggggactctggtcaccgtcagcagcggtggcggaggttcggggggaggaggaagcggcggcggagggtccgagattgtgctgacccagtcacccggcactttgtccctgtcgcctggagaaagggccaccctttcctgccgggcatcccaatccgtgtcctcctcgtacctggcctggtaccagcagaggcccggacaggccccacggcttctgatctacggagcaagcagccgcgcgaccggtatcccggaccggttttcgggctcgggctcaggaactgacttcaccctcaccatctcccgcctggaacccgaagatttcgctgtgtattactgccagcactacggcagctccccgtcctggacgttcggccagggaactcggctggagatcaag

SEQ ID NO: 1149 - protein, 118 aa, Artificial Sequence
  source: /note="Description of Artificial Sequence: Synthetic polypeptide"
EVQLLESGGGLVQPGGSLRLSCAASGFTFSSYAMSWVRQAPGKGLEWVSAISGSGGSTYYADSVKGRFTISRDNSKNTLYLQMNSLRAEDTAVYYCAKIPQTGTFDYWGQGTLVTVSS

SEQ ID NO: 1150 - protein, 109 aa, Artificial Sequence
  source: /note="Description of Artificial Sequence: Synthetic polypeptide"
EIVLTQSPGTLSLSPGERATLSCRASQSVSSSYLAWYQQRPGQAPRLLIYGASSRATGIPDRFSGSGSGTDFTLTISRLEPEDFAVYYCQHYGSSPSWTFGQGTRLEIK

SEQ ID NO: 1151 - protein, 486 aa, Artificial Sequence
  source: /note="Description of Artificial Sequence: Synthetic polypeptide"
MALPVTALLLPLALLLHAARPEVQLLESGGGLVQPGGSLRLSCAASGFTFSSYAMSWVRQAPGKGLEWVSAISGSGGSTYYADSVKGRFTISRDNSKNTLYLQMNSLRAEDTAVYYCAKIPQTGTFDYWGQGTLVTVSSGGGGSGGGGSGGGGSEIVLTQSPGTLSLSPGERATLSCRASQSVSSSYLAWYQQRPGQAPRLLIYGASSRATGIPDRFSGSGSGTDFTLTISRLEPEDFAVYYCQHYGSSPSWTFGQGTRLEIKTTTPAPRPPTPAPTIASQPLSLRPEACRPAAGGAVHTRGLDFACDIYIWAPLAGTCGVLLLSLVITLYCKRGRKKLLYIFKQPFMRPVQTTQEEDGCSCRFPEEEEGGCELRVKFSRSADAPAYKQGQNQLYNELNLGRREEYDVLDKRRGRDPEMGGKPRRKNPQEGLYNELQKDKMAEAYSEIGMKGERRRGKGHDGLYQGLSTATKDTYDALHMQALPPR

SEQ ID NO: 1152 - DNA, 1458 bp, Artificial Sequence
  source: /note="Description of Artificial Sequence: Synthetic polynucleotide"
atggccctccctgtcaccgccctgctgcttccgctggctcttctgctccacgccgctcggcccgaagtgcagctgctggagtccggcggtggattggtgcaaccggggggatcgctcagactgtcctgtgcggcgtcaggcttcaccttctcgagctacgccatgtcatgggtcagacaggcccctggaaagggtctggaatgggtgtccgccatttccgggagcgggggatctacatactacgccgatagcgtgaagggccgcttcaccatttcccgggacaactccaagaacactctctatctgcaaatgaactccctccgcgctgaggacactgccgtgtactactgcgccaaaatccctcagaccggcaccttcgactactggggacaggggactctggtcaccgtcagcagcggtggcggaggttcggggggaggaggaagcggcggcggagggtccgagattgtgctgacccagtcacccggcactttgtccctgtcgcctggagaaagggccaccctttcctgccgggcatcccaatccgtgtcctcctcgtacctggcctggtaccagcagaggcccggacaggccccacggcttctgatctacggagcaagcagccgcgcgaccggtatcccggaccggttttcgggctcgggctcaggaactgacttcaccctcaccatctcccgcctggaacccgaagatttcgctgtgtattactgccagcactacggcagctccccgtcctggacgttcggccagggaactcggctggagatcaagaccactaccccagcaccgaggccacccaccccggctcctaccatcgcctcccagcctctgtccctgcgtccggaggcatgtagacccgcagctggtggggccgtgcatacccggggtcttgacttcgcctgcgatatctacatttgggcccctctggctggtacttgcggggtcctgctgctttcactcgtgatcactctttactgtaagcgcggtcggaagaagctgctgtacatctttaagcaacccttcatgaggcctgtgcagactactcaagaggaggacggctgttcatgccggttcccagaggaggaggaaggcggctgcgaactgcgcgtgaaattcagccgcagcgcagatgctccagcctacaagcaggggcagaaccagctctacaacgaactcaatcttggtcggagagaggagtacgacgtgctggacaagcggagaggacgggacccagaaatgggcgggaagccgcgcagaaagaatccccaagagggcctgtacaacgagctccaaaaggataagatggcagaagcctatagcgagattggtatgaaaggggaacgcagaagaggcaaaggccacgacggactgtaccagggactcagcaccgccaccaaggacacctatgacgctcttcacatgcaggccctgccgcctcgg

SEQ ID NO: 1153 - protein, 248 aa, Artificial Sequence
  source: /note="Description of Artificial Sequence: Synthetic polypeptide"
EVQLVETGGGLVQPGGSLRLSCAASGFTFSSYAMSWVRQAPGKGLEWVSAISGSGGSTYYADSVKGRFTMSRENDKNSVFLQMNSLRVEDTGVYYCARANYKRELRYYYGMDVWGQGTMVTVSSGGGGSGGGGSGGGGSEIVMTQSPGTLSLSPGESATLSCRASQRVASNYLAWYQHKPGQAPSLLISGASSRATGVPDRFSGSGSGTDFTLAISRLEPEDSAVYYCQHYDSSPSWTFGQGTKVEIK

SEQ ID NO: 1154 - DNA, 744 bp, Artificial Sequence
  source: /note="Description of Artificial Sequence: Synthetic polynucleotide"
gaagtgcaactggtggaaaccggtggaggactcgtgcagcctggcggcagcctccggctgagctgcgccgcttcgggattcaccttttcctcctacgcgatgtcttgggtcagacaggcccccggaaaggggctggaatgggtgtcagccatctccggctccggcggatcaacgtactacgccgactccgtgaaaggccggttcaccatgtcgcgcgagaatgacaagaactccgtgttcctgcaaatgaactccctgagggtggaggacaccggagtgtactattgtgcgcgcgccaactacaagagagagctgcggtactactacggaatggacgtctggggacagggaactatggtgaccgtgtcatccggtggagggggaagcggcggtggaggcagcgggggcgggggttcagaaattgtcatgacccagtccccgggaactctttccctctcccccggggaatccgcgactttgtcctgccgggccagccagcgcgtggcctcgaactacctcgcatggtaccagcataagccaggccaagccccttccctgctgatttccggggctagcagccgcgccactggcgtgccggataggttctcgggaagcggctcgggtaccgatttcaccctggcaatctcgcggctggaaccggaggattcggccgtgtactactgccagcactatgactcatccccctcctggacattcggacagggcaccaaggtcgagatcaag

SEQ ID NO: 1155 - protein, 124 aa, Artificial Sequence
  source: /note="Description of Artificial Sequence: Synthetic polypeptide"
EVQLVETGGGLVQPGGSLRLSCAASGFTFSSYAMSWVRQAPGKGLEWVSAISGSGGSTYYADSVKGRFTMSRENDKNSVFLQMNSLRVEDTGVYYCARANYKRELRYYYGMDVWGQGTMVTVSS

SEQ ID NO: 1156 - protein, 109 aa, Artificial Sequence
  source: /note="Description of Artificial Sequence: Synthetic polypeptide"
EIVMTQSPGTLSLSPGESATLSCRASQRVASNYLAWYQHKPGQAPSLLISGASSRATGVPDRFSGSGSGTDFTLAISRLEPEDSAVYYCQHYDSSPSWTFGQGTKVEIK

SEQ ID NO: 1157 - protein, 492 aa, Artificial Sequence
  source: /note="Description of Artificial Sequence: Synthetic polypeptide"
MALPVTALLLPLALLLHAARPEVQLVETGGGLVQPGGSLRLSCAASGFTFSSYAMSWVRQAPGKGLEWVSAISGSGGSTYYADSVKGRFTMSRENDKNSVFLQMNSLRVEDTGVYYCARANYKRELRYYYGMDVWGQGTMVTVSSGGGGSGGGGSGGGGSEIVMTQSPGTLSLSPGESATLSCRASQRVASNYLAWYQHKPGQAPSLLISGASSRATGVPDRFSGSGSGTDFTLAISRLEPEDSAVYYCQHYDSSPSWTFGQGTKVEIKTTTPAPRPPTPAPTIASQPLSLRPEACRPAAGGAVHTRGLDFACDIYIWAPLAGTCGVLLLSLVITLYCKRGRKKLLYIFKQPFMRPVQTTQEEDGCSCRFPEEEEGGCELRVKFSRSADAPAYKQGQNQLYNELNLGRREEYDVLDKRRGRDPEMGGKPRRKNPQEGLYNELQKDKMAEAYSEIGMKGERRRGKGHDGLYQGLSTATKDTYDALHMQALPPR

SEQ ID NO: 1158 - DNA, 1476 bp, Artificial Sequence
  source: /note="Description of Artificial Sequence: Synthetic polynucleotide"
atggccctccctgtcaccgccctgctgcttccgctggctcttctgctccacgccgctcggcccgaagtgcaactggtggaaaccggtggaggactcgtgcagcctggcggcagcctccggctgagctgcgccgcttcgggattcaccttttcctcctacgcgatgtcttgggtcagacaggcccccggaaaggggctggaatgggtgtcagccatctccggctccggcggatcaacgtactacgccgactccgtgaaaggccggttcaccatgtcgcgcgagaatgacaagaactccgtgttcctgcaaatgaactccctgagggtggaggacaccggagtgtactattgtgcgcgcgccaactacaagagagagctgcggtactactacggaatggacgtctggggacagggaactatggtgaccgtgtcatccggtggagggggaagcggcggtggaggcagcgggggcgggggttcagaaattgtcatgacccagtccccgggaactctttccctctcccccggggaatccgcgactttgtcctgccgggccagccagcgcgtggcctcgaactacctcgcatggtaccagcataagccaggccaagccccttccctgctgatttccggggctagcagccgcgccactggcgtgccggataggttctcgggaagcggctcgggtaccgatttcaccctggcaatctcgcggctggaaccggaggattcggccgtgtactactgccagcactatgactcatccccctcctggacattcggacagggcaccaaggtcgagatcaagaccactaccccagcaccgaggccacccaccccggctcctaccatcgcctcccagcctctgtccctgcgtccggaggcatgtagacccgcagctggtggggccgtgcatacccggggtcttgacttcgcctgcgatatctacatttgggcccctctggctggtacttgcggggtcctgctgctttcactcgtgatcactctttactgtaagcgcggtcggaagaagctgctgtacatctttaagcaacccttcatgaggcctgtgcagactactcaagaggaggacggctgttcatgccggttcccagaggaggaggaaggcggctgcgaactgcgcgtgaaattcagccgcagcgcagatgctccagcctacaagcaggggcagaaccagctctacaacgaactcaatcttggtcggagagaggagtacgacgtgctggacaagcggagaggacgggacccagaaatgggcgggaagccgcgcagaaagaatccccaagagggcctgtacaacgagctccaaaaggataagatggcagaagcctatagcgagattggtatgaaaggggaacgcagaagaggcaaaggccacgacggactgtaccagggactcagcaccgccaccaaggacacctatgacgctcttcacatgcaggccctgccgcctcgg

SEQ ID NO: 1159 - protein, 244 aa, Artificial Sequence
  source: /note="Description of Artificial Sequence: Synthetic polypeptide"
EVQLLETGGGLVQPGGSLRLSCAASGFSFSSYAMSWVRQAPGKGLEWVSAISGSGGSTYYADSVKGRFTISRDNSKNTLYLQMNSLRAEDTAVYYCAKALVGATGAFDIWGQGTLVTVSSGGGGSGGGGSGGGGSEIVLTQSPGTLSLSPGERATLSCRASQSLSSNFLAWYQQKPGQAPGLLIYGASNWATGTPDRFSGSGSGTDFTLTITRLEPEDFAVYYCQYYGTSPMYTFGQGTKVEIK

SEQ ID NO: 1160 - DNA, 732 bp, Artificial Sequence
  source: /note="Description of Artificial Sequence: Synthetic polynucleotide"
gaagtgcagctgctcgaaaccggtggagggctggtgcagccagggggctccctgaggctttcatgcgccgctagcggattctccttctcctcttacgccatgtcgtgggtccgccaagcccctggaaaaggcctggaatgggtgtccgcgatttccgggagcggaggttcgacctattacgccgactccgtgaagggccgctttaccatctcccgggataactccaagaacactctgtacctccaaatgaactcgctgagagccgaggacaccgccgtgtattactgcgcgaaggcgctggtcggcgcgactggggcattcgacatctggggacagggaactcttgtgaccgtgtcgagcggaggcggcggctccggcggaggagggagcgggggcggtggttccgaaatcgtgttgactcagtccccgggaaccctgagcttgtcacccggggagcgggccactctctcctgtcgcgcctcccaatcgctctcatccaatttcctggcctggtaccagcagaagcccggacaggccccgggcctgctcatctacggcgcttcaaactgggcaacgggaacccctgatcggttcagcggaagcggatcgggtactgactttaccctgaccatcaccagactggaaccggaggacttcgccgtgtactactgccagtactacggcacctcccccatgtacacattcggacagggtaccaaggtcgagattaag

SEQ ID NO: 1161 - protein, 120 aa, Artificial Sequence
  source: /note="Description of Artificial Sequence: Synthetic polypeptide"
EVQLLETGGGLVQPGGSLRLSCAASGFSFSSYAMSWVRQAPGKGLEWVSAISGSGGSTYYADSVKGRFTISRDNSKNTLYLQMNSLRAEDTAVYYCAKALVGATGAFDIWGQGTLVTVSS

SEQ ID NO: 1162 - protein, 109 aa, Artificial Sequence
  source: /note="Description of Artificial Sequence: Synthetic polypeptide"
EIVLTQSPGTLSLSPGERATLSCRASQSLSSNFLAWYQQKPGQAPGLLIYGASNWATGTPDRFSGSGSGTDFTLTITRLEPEDFAVYYCQYYGTSPMYTFGQGTKVEIK

SEQ ID NO: 1163 - protein, 488 aa, Artificial Sequence
  source: /note="Description of Artificial Sequence: Synthetic polypeptide"
MALPVTALLLPLALLLHAARPEVQLLETGGGLVQPGGSLRLSCAASGFSFSSYAMSWVRQAPGKGLEWVSAISGSGGSTYYADSVKGRFTISRDNSKNTLYLQMNSLRAEDTAVYYCAKALVGATGAFDIWGQGTLVTVSSGGGGSGGGGSGGGGSEIVLTQSPGTLSLSPGERATLSCRASQSLSSNFLAWYQQKPGQAPGLLIYGASNWATGTPDRFSGSGSGTDFTLTITRLEPEDFAVYYCQYYGTSPMYTFGQGTKVEIKTTTPAPRPPTPAPTIASQPLSLRPEACRPAAGGAVHTRGLDFACDIYIWAPLAGTCGVLLLSLVITLYCKRGRKKLLYIFKQPFMRPVQTTQEEDGCSCRFPEEEEGGCELRVKFSRSADAPAYKQGQNQLYNELNLGRREEYDVLDKRRGRDPEMGGKPRRKNPQEGLYNELQKDKMAEAYSEIGMKGERRRGKGHDGLYQGLSTATKDTYDALHMQALPPR

SEQ ID NO: 1164 - DNA, 1464 bp, Artificial Sequence
  source: /note="Description of Artificial Sequence: Synthetic polynucleotide"
atggccctccctgtcaccgccctgctgcttccgctggctcttctgctccacgccgctcggcccgaagtgcagctgctcgaaaccggtggagggctggtgcagccagggggctccctgaggctttcatgcgccgctagcggattctccttctcctcttacgccatgtcgtgggtccgccaagcccctggaaaaggcctggaatgggtgtccgcgatttccgggagcggaggttcgacctattacgccgactccgtgaagggccgctttaccatctcccgggataactccaagaacactctgtacctccaaatgaactcgctgagagccgaggacaccgccgtgtattactgcgcgaaggcgctggtcggcgcgactggggcattcgacatctggggacagggaactcttgtgaccgtgtcgagcggaggcggcggctccggcggaggagggagcgggggcggtggttccgaaatcgtgttgactcagtccccgggaaccctgagcttgtcacccggggagcgggccactctctcctgtcgcgcctcccaatcgctctcatccaatttcctggcctggtaccagcagaagcccggacaggccccgggcctgctcatctacggcgcttcaaactgggcaacgggaacccctgatcggttcagcggaagcggatcgggtactgactttaccctgaccatcaccagactggaaccggaggacttcgccgtgtactactgccagtactacggcacctcccccatgtacacattcggacagggtaccaaggtcgagattaagaccactaccccagcaccgaggccacccaccccggctcctaccatcgcctcccagcctctgtccctgcgtccggaggcatgtagacccgcagctggtggggccgtgcatacccggggtcttgacttcgcctgcgatatctacatttgggcccctctggctggtacttgcggggtcctgctgctttcactcgtgatcactctttactgtaagcgcggtcggaagaagctgctgtacatctttaagcaacccttcatgaggcctgtgcagactactcaagaggaggacggctgttcatgccggttcccagaggaggaggaaggcggctgcgaactgcgcgtgaaattcagccgcagcgcagatgctccagcctacaagcaggggcagaaccagctctacaacgaactcaatcttggtcggagagaggagtacgacgtgctggacaagcggagaggacgggacccagaaatgggcgggaagccgcgcagaaagaatccccaagagggcctgtacaacgagctccaaaaggataagatggcagaagcctatagcgagattggtatgaaaggggaacgcagaagaggcaaaggccacgacggactgtaccagggactcagcaccgccaccaaggacacctatgacgctcttcacatgcaggccctgccgcctcgg

SEQ ID NO: 1165 - protein, 244 aa, Artificial Sequence
  source: /note="Description of Artificial Sequence: Synthetic polypeptide"
EVQLLESGGGLVQPGGSLRLSCAASGFTFSSYAMSWVRQAPGKGLEWVSAISGSGGSTYYADSVKGRFTISRDNSKNTLYLQMNSLRAEDTAVYYCVLWFGEGFDPWGQGTLVTVSSGGGGSGGGGSGGGGSDIVLTQSPLSLPVTPGEPASISCRSSQSLLHSNGYNYLDWYLQKPGQSPQLLIYLGSNRASGVPDRFSGSGSGTDFTLKISRVEAEDVGVYYCMQALQTPLTFGGGTKVDIK

SEQ ID NO: 1166 - DNA, 733 bp, Artificial Sequence
  source: /note="Description of Artificial Sequence: Synthetic polynucleotide"
gaagtgcagctgcttgagagcggtggaggtctggtgcagcccgggggatcactgcgcctgtcctgtgccgcgtccggtttcactttctcctcgtacgccatgtcgtgggtcagacaggcaccgggaaagggactggaatgggtgtcagccatttcgggttcggggggcagcacctactacgctgactccgtgaagggccggttcaccatttcccgcgacaactccaagaacaccttgtacctccaaatgaactccctgcgggccgaagataccgccgtgtattactgcgtgctgtggttcggagagggattcgacccgtggggacaaggaacactcgtgactgtgtcatccggcggaggcggcagcggtggcggcggttccggcggcggcggatctgacatcgtgttgacccagtcccctctgagcctgccggtcactcctggcgaaccagccagcatctcctgccggtcgagccagtccctcctgcactccaatgggtacaactacctcgattggtatctgcaaaagccgggccagagcccccagctgctgatctaccttgggtcaaaccgcgcttccggggtgcctgatagattctccgggtccgggagcggaaccgactttaccctgaaaatctcgagggtggaggccgaggacgtcggagtgtactactgcatgcaggcgctccagactcccctgaccttcggaggaggaacgaaggtcgacatcaaga

SEQ ID NO: 1167 - protein, 117 aa, Artificial Sequence
  source: /note="Description of Artificial Sequence: Synthetic polypeptide"
EVQLLESGGGLVQPGGSLRLSCAASGFTFSSYAMSWVRQAPGKGLEWVSAISGSGGSTYYADSVKGRFTISRDNSKNTLYLQMNSLRAEDTAVYYCVLWFGEGFDPWGQGTLVTVSS

SEQ ID NO: 1168 - protein, 112 aa, Artificial Sequence
  source: /note="Description of Artificial Sequence: Synthetic polypeptide"
DIVLTQSPLSLPVTPGEPASISCRSSQSLLHSNGYNYLDWYLQKPGQSPQLLIYLGSNRASGVPDRFSGSGSGTDFTLKISRVEAEDVGVYYCMQALQTPLTFGGGTKVDIK

SEQ ID NO: 1169 - protein, 488 aa, Artificial Sequence
  source: /note="Description of Artificial Sequence: Synthetic polypeptide"
MALPVTALLLPLALLLHAARPEVQLLESGGGLVQPGGSLRLSCAASGFTFSSYAMSWVRQAPGKGLEWVSAISGSGGSTYYADSVKGRFTISRDNSKNTLYLQMNSLRAEDTAVYYCVLWFGEGFDPWGQGTLVTVSSGGGGSGGGGSGGGGSDIVLTQSPLSLPVTPGEPASISCRSSQSLLHSNGYNYLDWYLQKPGQSPQLLIYLGSNRASGVPDRFSGSGSGTDFTLKISRVEAEDVGVYYCMQALQTPLTFGGGTKVDIKTTTPAPRPPTPAPTIASQPLSLRPEACRPAAGGAVHTRGLDFACDIYIWAPLAGTCGVLLLSLVITLYCKRGRKKLLYIFKQPFMRPVQTTQEEDGCSCRFPEEEEGGCELRVKFSRSADAPAYKQGQNQLYNELNLGRREEYDVLDKRRGRDPEMGGKPRRKNPQEGLYNELQKDKMAEAYSEIGMKGERRRGKGHDGLYQGLSTATKDTYDALHMQALPPR

SEQ ID NO: 1170 - DNA, 1464 bp, Artificial Sequence
  source: /note="Description of Artificial Sequence: Synthetic polynucleotide"
atggccctccctgtcaccgccctgctgcttccgctggctcttctgctccacgccgctcggcccgaagtgcagctgcttgagagcggtggaggtctggtgcagcccgggggatcactgcgcctgtcctgtgccgcgtccggtttcactttctcctcgtacgccatgtcgtgggtcagacaggcaccgggaaagggactggaatgggtgtcagccatttcgggttcggggggcagcacctactacgctgactccgtgaagggccggttcaccatttcccgcgacaactccaagaacaccttgtacctccaaatgaactccctgcgggccgaagataccgccgtgtattactgcgtgctgtggttcggagagggattcgacccgtggggacaaggaacactcgtgactgtgtcatccggcggaggcggcagcggtggcggcggttccggcggcggcggatctgacatcgtgttgacccagtcccctctgagcctgccggtcactcctggcgaaccagccagcatctcctgccggtcgagccagtccctcctgcactccaatgggtacaactacctcgattggtatctgcaaaagccgggccagagcccccagctgctgatctaccttgggtcaaaccgcgcttccggggtgcctgatagattctccgggtccgggagcggaaccgactttaccctgaaaatctcgagggtggaggccgaggacgtcggagtgtactactgcatgcaggcgctccagactcccctgaccttcggaggaggaacgaaggtcgacatcaagaccactaccccagcaccgaggccacccaccccggctcctaccatcgcctcccagcctctgtccctgcgtccggaggcatgtagacccgcagctggtggggccgtgcatacccggggtcttgacttcgcctgcgatatctacatttgggcccctctggctggtacttgcggggtcctgctgctttcactcgtgatcactctttactgtaagcgcggtcggaagaagctgctgtacatctttaagcaacccttcatgaggcctgtgcagactactcaagaggaggacggctgttcatgccggttcccagaggaggaggaaggcggctgcgaactgcgcgtgaaattcagccgcagcgcagatgctccagcctacaagcaggggcagaaccagctctacaacgaactcaatcttggtcggagagaggagtacgacgtgctggacaagcggagaggacgggacccagaaatgggcgggaagccgcgcagaaagaatccccaagagggcctgtacaacgagctccaaaaggataagatggcagaagcctatagcgagattggtatgaaaggggaacgcagaagaggcaaaggccacgacggactgtaccagggactcagcaccgccaccaaggacacctatgacgctcttcacatgcaggccctgccgcctcgg

SEQ ID NO: 1171 - protein, 251 aa, Artificial Sequence
  source: /note="Description of Artificial Sequence: Synthetic polypeptide"
QVQLVESGGGLVQPGGSLRLSCAASGFTFSSYAMSWVRQAPGKGLEWVSAISGSGGSTYYADSVKGRFTISRDNSKNTLYLQMNSLRAEDTAVYYCAKVGYDSSGYYRDYYGMDVWGQGTTVTVSSGGGGSGGGGSGGGGSEIVLTQSPGTLSLSPGERATLSCRASQSVSSSYLAWYQQKPGQAPRLLIYGTSSRATGISDRFSGSGSGTDFTLTISRLEPEDFAVYYCQHYGNSPPKFTFGPGTKLEIK

SEQ ID NO: 1172 - DNA, 753 bp, Artificial Sequence
  source: /note="Description of Artificial Sequence: Synthetic polynucleotide"
caagtgcagctcgtggagtcaggcggaggactggtgcagcccgggggctccctgagactttcctgcgcggcatcgggttttaccttctcctcctatgctatgtcctgggtgcgccaggccccgggaaagggactggaatgggtgtccgcaatcagcggtagcgggggctcaacatactacgccgactccgtcaagggtcgcttcactatttcccgggacaactccaagaataccctgtacctccaaatgaacagcctcagggccgaggatactgccgtgtactactgcgccaaagtcggatacgatagctccggttactaccgggactactacggaatggacgtgtggggacagggcaccaccgtgaccgtgtcaagcggcggaggcggttcaggagggggaggctccggcggtggagggtccgaaatcgtcctgactcagtcgcctggcactctgtcgttgtccccgggggagcgcgctaccctgtcgtgtcgggcgtcgcagtccgtgtcgagctcctacctcgcgtggtaccagcagaagcccggacaggcccctagacttctgatctacggcacttcttcacgcgccaccgggatcagcgacaggttcagcggctccggctccgggaccgacttcaccctgaccattagccggctggagcctgaagatttcgccgtgtattactgccaacactacggaaactcgccgccaaagttcacgttcggacccggaaccaagctggaaatcaag

SEQ ID NO: 1173 - protein, 126 aa, Artificial Sequence
  source: /note="Description of Artificial Sequence: Synthetic polypeptide"
QVQLVESGGGLVQPGGSLRLSCAASGFTFSSYAMSWVRQAPGKGLEWVSAISGSGGSTYYADSVKGRFTISRDNSKNTLYLQMNSLRAEDTAVYYCAKVGYDSSGYYRDYYGMDVWGQGTTVTVSS

SEQ ID NO: 1174 - protein, 110 aa, Artificial Sequence
  source: /note="Description of Artificial Sequence: Synthetic polypeptide"
EIVLTQSPGTLSLSPGERATLSCRASQSVSSSYLAWYQQKPGQAPRLLIYGTSSRATGISDRFSGSGSGTDFTLTISRLEPEDFAVYYCQHYGNSPPKFTFGPGTKLEIK

SEQ ID NO: 1175 - protein, 495 aa, Artificial Sequence
  source: /note="Description of Artificial Sequence: Synthetic polypeptide"
MALPVTALLLPLALLLHAARPQVQLVESGGGLVQPGGSLRLSCAASGFTFSSYAMSWVRQAPGKGLEWVSAISGSGGSTYYADSVKGRFTISRDNSKNTLYLQMNSLRAEDTAVYYCAKVGYDSSGYYRDYYGMDVWGQGTTVTVSSGGGGSGGGGSGGGGSEIVLTQSPGTLSLSPGERATLSCRASQSVSSSYLAWYQQKPGQAPRLLIYGTSSRATGISDRFSGSGSGTDFTLTISRLEPEDFAVYYCQHYGNSPPKFTFGPGTKLEIKTTTPAPRPPTPAPTIASQPLSLRPEACRPAAGGAVHTRGLDFACDIYIWAPLAGTCGVLLLSLVITLYCKRGRKKLLYIFKQPFMRPVQTTQEEDGCSCRFPEEEEGGCELRVKFSRSADAPAYKQGQNQLYNELNLGRREEYDVLDKRRGRDPEMGGKPRRKNPQEGLYNELQKDKMAEAYSEIGMKGERRRGKGHDGLYQGLSTATKDTYDALHMQALPPR

SEQ ID NO: 1176 - DNA, 1485 bp, Artificial Sequence
  source: /note="Description of Artificial Sequence: Synthetic polynucleotide"
atggccctccctgtcaccgccctgctgcttccgctggctcttctgctccacgccgctcggccccaagtgcagctcgtggagtcaggcggaggactggtgcagcccgggggctccctgagactttcctgcgcggcatcgggttttaccttctcctcctatgctatgtcctgggtgcgccaggccccgggaaagggactggaatgggtgtccgcaatcagcggtagcgggggctcaacatactacgccgactccgtcaagggtcgcttcactatttcccgggacaactccaagaataccctgtacctccaaatgaacagcctcagggccgaggatactgccgtgtactactgcgccaaagtcggatacgatagctccggttactaccgggactactacggaatggacgtgtggggacagggcaccaccgtgaccgtgtcaagcggcggaggcggttcaggagggggaggctccggcggtggagggtccgaaatcgtcctgactcagtcgcctggcactctgtcgttgtccccgggggagcgcgctaccctgtcgtgtcgggcgtcgcagtccgtgtcgagctcctacctcgcgtggtaccagcagaagcccggacaggcccctagacttctgatctacggcacttcttcacgcgccaccgggatcagcgacaggttcagcggctccggctccgggaccgacttcaccctgaccattagccggctggagcctgaagatttcgccgtgtattactgccaacactacggaaactcgccgccaaagttcacgttcggacccggaaccaagctggaaatcaagaccactaccccagcaccgaggccacccaccccggctcctaccatcgcctcccagcctctgtccctgcgtccggaggcatgtagacccgcagctggtggggccgtgcatacccggggtcttgacttcgcctgcgatatctacatttgggcccctctggctggtacttgcggggtcctgctgctttcactcgtgatcactctttactgtaagcgcggtcggaagaagctgctgtacatctttaagcaacccttcatgaggcctgtgcagactactcaagaggaggacggctgttcatgccggttcccagaggaggaggaaggcggctgcgaactgcgcgtgaaattcagccgcagcgcagatgctccagcctacaagcaggggcagaaccagctctacaacgaactcaatcttggtcggagagaggagtacgacgtgctggacaagcggagaggacgggacccagaaatgggcgggaagccgcgcagaaagaatccccaagagggcctgtacaacgagctccaaaaggataagatggcagaagcctatagcgagattggtatgaaaggggaacgcagaagaggcaaaggccacgacggactgtaccagggactcagcaccgccaccaaggacacctatgacgctcttcacatgcaggccctgccgcctcgg

SEQ ID NO: 1177 - protein, 246 aa, Artificial Sequence
  source: /note="Description of Artificial Sequence: Synthetic polypeptide"
EVQLVESGGGLVQPGGSLRLSCAASGFTFSSYAMSWVRQAPGKGLEWVSAISGSGGSTYYADSVKGRFTISRDNSKNTLYLQMNSLRAEDTAVYYCAKMGWSSGYLGAFDIWGQGTTVTVSSGGGGSGGGGSGGGGSEIVLTQSPGTLSLSPGERATLSCRASQSVASSFLAWYQQKPGQAPRLLIYGASGRATGIPDRFSGSGSGTDFTLTISRLEPEDFAVYYCQHYGGSPRLTFGGGTKVDIK

SEQ ID NO: 1178 - DNA, 739 bp, Artificial Sequence
  source: /note="Description of Artificial Sequence: Synthetic polynucleotide"
gaagtccaactggtggagtccgggggagggctcgtgcagcccggaggcagccttcggctgtcgtgcgccgcctccgggttcacgttctcatcctacgcgatgtcgtgggtcagacaggcaccaggaaagggactggaatgggtgtccgccattagcggctccggcggtagcacctactatgccgactcagtgaagggaaggttcactatctcccgcgacaacagcaagaacaccctgtacctccaaatgaactctctgcgggccgaggataccgcggtgtactattgcgccaagatgggttggtccagcggatacttgggagccttcgacatttggggacagggcactactgtgaccgtgtcctccgggggtggcggatcgggaggcggcggctcgggtggagggggttccgaaatcgtgttgacccagtcaccgggaaccctctcgctgtccccgggagaacgggctacactgtcatgtagagcgtcccagtccgtggcttcctcgttcctggcctggtaccagcagaagccgggacaggcaccccgcctgctcatctacggagccagcggccgggcgaccggcatccctgaccgcttctccggttccggctcgggcaccgactttactctgaccattagcaggcttgagcccgaggattttgccgtgtactactgccaacactacggggggagccctcgcctgaccttcggaggcggaactaaggtcgatatcaaaa

SEQ ID NO: 1179 - protein, 122 aa, Artificial Sequence
  source: /note="Description of Artificial Sequence: Synthetic polypeptide"
EVQLVESGGGLVQPGGSLRLSCAASGFTFSSYAMSWVRQAPGKGLEWVSAISGSGGSTYYADSVKGRFTISRDNSKNTLYLQMNSLRAEDTAVYYCAKMGWSSGYLGAFDIWGQGTTVTVSS

SEQ ID NO: 1180 - protein, 109 aa, Artificial Sequence
  source: /note="Description of Artificial Sequence: Synthetic polypeptide"
EIVLTQSPGTLSLSPGERATLSCRASQSVASSFLAWYQQKPGQAPRLLIYGASGRATGIPDRFSGSGSGTDFTLTISRLEPEDFAVYYCQHYGGSPRLTFGGGTKVDIK

SEQ ID NO: 1181 - protein, 490 aa, Artificial Sequence
  source: /note="Description of Artificial Sequence: Synthetic polypeptide"
MALPVTALLLPLALLLHAARPEVQLVESGGGLVQPGGSLRLSCAASGFTFSSYAMSWVRQAPGKGLEWVSAISGSGGSTYYADSVKGRFTISRDNSKNTLYLQMNSLRAEDTAVYYCAKMGWSSGYLGAFDIWGQGTTVTVSSGGGGSGGGGSGGGGSEIVLTQSPGTLSLSPGERATLSCRASQSVASSFLAWYQQKPGQAPRLLIYGASGRATGIPDRFSGSGSGTDFTLTISRLEPEDFAVYYCQHYGGSPRLTFGGGTKVDIKTTTPAPRPPTPAPTIASQPLSLRPEACRPAAGGAVHTRGLDFACDIYIWAPLAGTCGVLLLSLVITLYCKRGRKKLLYIFKQPFMRPVQTTQEEDGCSCRFPEEEEGGCELRVKFSRSADAPAYKQGQNQLYNELNLGRREEYDVLDKRRGRDPEMGGKPRRKNPQEGLYNELQKDKMAEAYSEIGMKGERRRGKGHDGLYQGLSTATKDTYDALHMQALPPR

SEQ ID NO: 1182 - DNA, 1470 bp, Artificial Sequence
  source: /note="Description of Artificial Sequence: Synthetic polynucleotide"
atggccctccctgtcaccgccctgctgcttccgctggctcttctgctccacgccgctcggcccgaagtccaactggtggagtccgggggagggctcgtgcagcccggaggcagccttcggctgtcgtgcgccgcctccgggttcacgttctcatcctacgcgatgtcgtgggtcagacaggcaccaggaaagggactggaatgggtgtccgccattagcggctccggcggtagcacctactatgccgactcagtgaagggaaggttcactatctcccgcgacaacagcaagaacaccctgtacctccaaatgaactctctgcgggccgaggataccgcggtgtactattgcgccaagatgggttggtccagcggatacttgggagccttcgacatttggggacagggcactactgtgaccgtgtcctccgggggtggcggatcgggaggcggcggctcgggtggagggggttccgaaatcgtgttgacccagtcaccgggaaccctctcgctgtccccgggagaacgggctacactgtcatgtagagcgtcccagtccgtggcttcctcgttcctggcctggtaccagcagaagccgggacaggcaccccgcctgctcatctacggagccagcggccgggcgaccggcatccctgaccgcttctccggttccggctcgggcaccgactttactctgaccattagcaggcttgagcccgaggattttgccgtgtactactgccaacactacggggggagccctcgcctgaccttcggaggcggaactaaggtcgatatcaaaaccactaccccagcaccgaggccacccaccccggctcctaccatcgcctcccagcctctgtccctgcgtccggaggcatgtagacccgcagctggtggggccgtgcatacccggggtcttgacttcgcctgcgatatctacatttgggcccctctggctggtacttgcggggtcctgctgctttcactcgtgatcactctttactgtaagcgcggtcggaagaagctgctgtacatctttaagcaacccttcatgaggcctgtgcagactactcaagaggaggacggctgttcatgccggttcccagaggaggaggaaggcggctgcgaactgcgcgtgaaattcagccgcagcgcagatgctccagcctacaagcaggggcagaaccagctctacaacgaactcaatcttggtcggagagaggagtacgacgtgctggacaagcggagaggacgggacccagaaatgggcgggaagccgcgcagaaagaatccccaagagggcctgtacaacgagctccaaaaggataagatggcagaagcctatagcgagattggtatgaaaggggaacgcagaagaggcaaaggccacgacggactgtaccagggactcagcaccgccaccaaggacacctatgacgctcttcacatgcaggccctgccgcctcgg

SEQ ID NO: 1183 - protein, 122 aa, Artificial Sequence
  source: /note="Description of Artificial Sequence: Synthetic polypeptide"
QIQLVQSGPDLKKPGETVKLSCKASGYTFTNFGMNWVKQAPGKGFKWMAWINTYTGESYFADDFKGRFAFSVETSATTAYLQINNLKTEDTATYFCARGEIYYGYDGGFAYWGQGTLVTVSA

SEQ ID NO: 1184 - protein, 107 aa, Artificial Sequence
  source: /note="Description of Artificial Sequence: Synthetic polypeptide"
DVVMTQSHRFMSTSVGDRVSITCRASQDVNTAVSWYQQKPGQSPKLLIFSASYRYTGVPDRFTGSGSGADFTLTISSVQAEDLAVYYCQQHYSTPWTFGGGTKLDIK

SEQ ID NO: 1185 - protein, 244 aa, Artificial Sequence
  source: /note="Description of Artificial Sequence: Synthetic polypeptide"
QIQLVQSGPDLKKPGETVKLSCKASGYTFTNFGMNWVKQAPGKGFKWMAWINTYTGESYFADDFKGRFAFSVETSATTAYLQINNLKTEDTATYFCARGEIYYGYDGGFAYWGQGTLVTVSAGGGGSGGGGSGGGGSDVVMTQSHRFMSTSVGDRVSITCRASQDVNTAVSWYQQKPGQSPKLLIFSASYRYTGVPDRFTGSGSGADFTLTISSVQAEDLAVYYCQQHYSTPWTFGGGTKLDIK

SEQ ID NO: 1186 - protein, 467 aa, Artificial Sequence
  source: /note="Description of Artificial Sequence: Synthetic polypeptide"
QIQLVQSGPDLKKPGETVKLSCKASGYTFTNFGMNWVKQAPGKGFKWMAWINTYTGESYFADDFKGRFAFSVETSATTAYLQINNLKTEDTATYFCARGEIYYGYDGGFAYWGQGTLVTVSAGGGGSGGGGSGGGGSDVVMTQSHRFMSTSVGDRVSITCRASQDVNTAVSWYQQKPGQSPKLLIFSASYRYTGVPDRFTGSGSGADFTLTISSVQAEDLAVYYCQQHYSTPWTFGGGTKLDIKTTTPAPRPPTPAPTIASQPLSLRPEACRPAAGGAVHTRGLDFACDIYIWAPLAGTCGVLLLSLVITLYCKRGRKKLLYIFKQPFMRPVQTTQEEDGCSCRFPEEEEGGCELRVKFSRSADAPAYKQGQNQLYNELNLGRREEYDVLDKRRGRDPEMGGKPRRKNPQEGLYNELQKDKMAEAYSEIGMKGERRRGKGHDGLYQGLSTATKDTYDALHMQALPPR

SEQ ID NO: 1187 - protein, 117 aa, Artificial Sequence
  source: /note="Description of Artificial Sequence: Synthetic polypeptide"
QIQLVQSGPELKKPGETVKISCKASGYTFTDYSINWVKRAPGKGLKWMGWINTETREPAYAYDFRGRFAFSLETSASTAYLQINNLKYEDTATYFCALDYSYAMDYWGQGTSVTVSS

SEQ ID NO: 1188 - protein, 111 aa, Artificial Sequence
  source: /note="Description of Artificial Sequence: Synthetic polypeptide"
DIVLTQSPASLAMSLGKRATISCRASESVSVIGAHLIHWYQQKPGQPPKLLIYLASNLETGVPARFSGSGSGTDFTLTIDPVEEDDVAIYSCLQSRIFPRTFGGGTKLEIK

SEQ ID NO: 1189 - protein, 249 aa, Artificial Sequence
  source: /note="Description of Artificial Sequence: Synthetic polypeptide"
QIQLVQSGPELKKPGETVKISCKASGYTFTDYSINWVKRAPGKGLKWMGWINTETREPAYAYDFRGRFAFSLETSASTAYLQINNLKYEDTATYFCALDYSYAMDYWGQGTSVTVSSGGGGSGGGGSGGGGSQIQLVQSGPELKKPGETVKISCKASGYTFTDYSINWVKRAPGKGLKWMGWINTETREPAYAYDFRGRFAFSLETSASTAYLQINNLKYEDTATYFCALDYSYAMDYWGQGTSVTVSS

SEQ ID NO: 1190 - protein, 472 aa, Artificial Sequence
  source: /note="Description of Artificial Sequence: Synthetic polypeptide"
QIQLVQSGPELKKPGETVKISCKASGYTFTDYSINWVKRAPGKGLKWMGWINTETREPAYAYDFRGRFAFSLETSASTAYLQINNLKYEDTATYFCALDYSYAMDYWGQGTSVTVSSGGGGSGGGGSGGGGSQIQLVQSGPELKKPGETVKISCKASGYTFTDYSINWVKRAPGKGLKWMGWINTETREPAYAYDFRGRFAFSLETSASTAYLQINNLKYEDTATYFCALDYSYAMDYWGQGTSVTVSSTTTPAPRPPTPAPTIASQPLSLRPEACRPAAGGAVHTRGLDFACDIYIWAPLAGTCGVLLLSLVITLYCKRGRKKLLYIFKQPFMRPVQTTQEEDGCSCRFPEEEEGGCELRVKFSRSADAPAYKQGQNQLYNELNLGRREEYDVLDKRRGRDPEMGGKPRRKNPQEGLYNELQKDKMAEAYSEIGMKGERRRGKGHDGLYQGLSTATKDTYDALHMQALPPR

SEQ ID NO: 1191 - protein, 117 aa, Artificial Sequence
  source: /note="Description of Artificial Sequence: Synthetic polypeptide"
QIQLVQSGPELKKPGETVKISCKASGYTFRHYSMNWVKQAPGKGLKWMGRINTESGVPIYADDFKGRFAFSVETSASTAYLVINNLKDEDTASYFCSNDYLYSLDFWGQGTALTVSS

SEQ ID NO: 1192 - protein, 111 aa, Artificial Sequence
  source: /note="Description of Artificial Sequence: Synthetic polypeptide"
DIVLTQSPPSLAMSLGKRATISCRASESVTILGSHLIYWYQQKPGQPPTLLIQLASNVQTGVPARFSGSGSRTDFTLTIDPVEEDDVAVYYCLQSRTIPRTFGGGTKLEIK

SEQ ID NO: 1193 - protein, 243 aa, Artificial Sequence
  source: /note="Description of Artificial Sequence: Synthetic polypeptide"
QIQLVQSGPELKKPGETVKISCKASGYTFRHYSMNWVKQAPGKGLKWMGRINTESGVPIYADDFKGRFAFSVETSASTAYLVINNLKDEDTASYFCSNDYLYSLDFWGQGTALTVSSGGGGSGGGGSGGGGSDIVLTQSPPSLAMSLGKRATISCRASESVTILGSHLIYWYQQKPGQPPTLLIQLASNVQTGVPARFSGSGSRTDFTLTIDPVEEDDVAVYYCLQSRTIPRTFGGGTKLEIK

SEQ ID NO: 1194 - protein, 466 aa, Artificial Sequence
  source: /note="Description of Artificial Sequence: Synthetic polypeptide"
QIQLVQSGPELKKPGETVKISCKASGYTFRHYSMNWVKQAPGKGLKWMGRINTESGVPIYADDFKGRFAFSVETSASTAYLVINNLKDEDTASYFCSNDYLYSLDFWGQGTALTVSSGGGGSGGGGSGGGGSDIVLTQSPPSLAMSLGKRATISCRASESVTILGSHLIYWYQQKPGQPPTLLIQLASNVQTGVPARFSGSGSRTDFTLTIDPVEEDDVAVYYCLQSRTIPRTFGGGTKLEIKTTTPAPRPPTPAPTIASQPLSLRPEACRPAAGGAVHTRGLDFACDIYIWAPLAGTCGVLLLSLVITLYCKRGRKKLLYIFKQPFMRPVQTTQEEDGCSCRFPEEEEGGCELRVKFSRSADAPAYKQGQNQLYNELNLGRREEYDVLDKRRGRDPEMGGKPRRKNPQEGLYNELQKDKMAEAYSEIGMKGERRRGKGHDGLYQGLSTATKDTYDALHMQALPPR

SEQ ID NO: 1195 - protein, 117 aa, Artificial Sequence
  source: /note="Description of Artificial Sequence: Synthetic polypeptide"
QIQLVQSGPELKKPGETVKISCKASGYTFTHYSMNWVKQAPGKGLKWMGRINTETGEPLYADDFKGRFAFSLETSASTAYLVINNLKNEDTATFFCSNDYLYSCDYWGQGTTLTVSS

SEQ ID NO: 1196 - protein, 111 aa, Artificial Sequence; identical to SEQ ID NO: 1192
  source: /note="Description of Artificial Sequence: Synthetic polypeptide"

SEQ ID NO: 1197 - protein, 243 aa, Artificial Sequence
  source: /note="Description of Artificial Sequence: Synthetic polypeptide"
QIQLVQSGPELKKPGETVKISCKASGYTFTHYSMNWVKQAPGKGLKWMGRINTETGEPLYADDFKGRFAFSLETSASTAYLVINNLKNEDTATFFCSNDYLYSCDYWGQGTTLTVSSGGGGSGGGGSGGGGSDIVLTQSPPSLAMSLGKRATISCRASESVTILGSHLIYWYQQKPGQPPTLLIQLASNVQTGVPARFSGSGSRTDFTLTIDPVEEDDVAVYYCLQSRTIPRTFGGGTKLEIK

SEQ ID NO: 1198 - protein, 466 aa, Artificial Sequence
  source: /note="Description of Artificial Sequence: Synthetic polypeptide"
QIQLVQSGPELKKPGETVKISCKASGYTFTHYSMNWVKQAPGKGLKWMGRINTETGEPLYADDFKGRFAFSLETSASTAYLVINNLKNEDTATFFCSNDYLYSCDYWGQGTTLTVSSGGGGSGGGGSGGGGSDIVLTQSPPSLAMSLGKRATISCRASESVTILGSHLIYWYQQKPGQPPTLLIQLASNVQTGVPARFSGSGSRTDFTLTIDPVEEDDVAVYYCLQSRTIPRTFGGGTKLEIKTTTPAPRPPTPAPTIASQPLSLRPEACRPAAGGAVHTRGLDFACDIYIWAPLAGTCGVLLLSLVITLYCKRGRKKLLYIFKQPFMRPVQTTQEEDGCSCRFPEEEEGGCELRVKFSRSADAPAYKQGQNQLYNELNLGRREEYDVLDKRRGRDPEMGGKPRRKNPQEGLYNELQKDKMAEAYSEIGMKGERRRGKGHDGLYQGLSTATKDTYDALHMQALPPR

SEQ ID NO: 1199 - protein, 5 aa, Artificial Sequence
  source: /note="Description of Artificial Sequence: Synthetic peptide"
NHGMS

SEQ ID NO: 1200 - protein, 5 aa, Artificial Sequence
  source: /note="Description of Artificial Sequence: Synthetic peptide"
NYAMS

SEQ ID NO: 1201 - protein, 5 aa, Artificial Sequence
  source: /note="Description of Artificial Sequence: Synthetic peptide"
DYAMH

SEQ ID NO: 1202 - protein, 5 aa, Artificial Sequence
  source: /note="Description of Artificial Sequence: Synthetic peptide"
NHGMS

SEQ ID NO: 1203 - protein, 5 aa, Artificial Sequence
  source: /note="Description of Artificial Sequence: Synthetic peptide"
NFGIN

SEQ ID NO: 1204 - protein, 5 aa, Artificial Sequence
  source: /note="Description of Artificial Sequence: Synthetic peptide"
SDAMT

SEQ ID NO: 1205 - protein, 5 aa, Artificial Sequence
  source: /note="Description of Artificial Sequence: Synthetic peptide"
NYGIT

SEQ ID NO: 1206 - protein, 5 aa, Artificial Sequence
  source: /note="Description of Artificial Sequence: Synthetic peptide"
NHGMS

SEQ ID NO: 1207 - protein, 5 aa, Artificial Sequence
  source: /note="Description of Artificial Sequence: Synthetic peptide"
NHGMS

SEQ ID NO: 1208 - protein, 5 aa, Artificial Sequence
  source: /note="Description of Artificial Sequence: Synthetic peptide"
NHGMS

SEQ ID NO: 1209 - protein, 5 aa, Artificial Sequence
  source: /note="Description of Artificial Sequence: Synthetic peptide"
DYYMS

SEQ ID NO: 1210 - protein, 5 aa, Artificial Sequence
  source: /note="Description of Artificial Sequence: Synthetic peptide"
DYYMS

SEQ ID NO: 1211 - protein, 5 aa, Artificial Sequence
  source: /note="Description of Artificial Sequence: Synthetic peptide"
NHGMS

SEQ ID NO: 1212 - protein, 5 aa, Artificial Sequence
  source: /note="Description of Artificial Sequence: Synthetic peptide"
NHGMS

SEQ ID NO: 1213 - protein, 5 aa, Artificial Sequence
  source: /note="Description of Artificial Sequence: Synthetic peptide"
NHGMS

SEQ ID NO: 1214 - protein, 7 aa, Artificial Sequence
  source: /note="Description of Artificial Sequence: Synthetic peptide"
SSYYYWG

SEQ ID NO: 1215 - protein, 7 aa, Artificial Sequence
  source: /note="Description of Artificial Sequence: Synthetic peptide"
TSGMCVS

SEQ ID NO: 1216 - protein, 5 aa, Artificial Sequence
  source: /note="Description of Artificial Sequence: Synthetic peptide"
SYSMN

SEQ ID NO: 1217 - protein, 5 aa, Artificial Sequence
  source: /note="Description of Artificial Sequence: Synthetic peptide"
DYYMS

SEQ ID NO: 1218 - protein, 5 aa, Artificial Sequence
  source: /note="Description of Artificial Sequence: Synthetic peptide"
SHYIH

SEQ ID NO: 1219 - protein, 7 aa, Artificial Sequence
  source: /note="Description of Artificial Sequence: Synthetic peptide"
SGGYYWS

SEQ ID NO: 1220 - protein, 5 aa, Artificial Sequence
  source: /note="Description of Artificial Sequence: Synthetic peptide"
SYAIS

SEQ ID NO: 1221 - protein, 7 aa, Artificial Sequence
  source: /note="Description of Artificial Sequence: Synthetic peptide"
SNSAAWN

SEQ ID NO: 1222 - protein, 5 aa, Artificial Sequence
  source: /note="Description of Artificial Sequence: Synthetic peptide"
SYAMS

SEQ ID NO: 1223 - protein, 5 aa, Artificial Sequence
  source: /note="Description of Artificial Sequence: Synthetic peptide"
RYPMS

SEQ ID NO: 1224 - protein, 5 aa, Artificial Sequence
  source: /note="Description of Artificial Sequence: Synthetic peptide"
SYAMS

SEQ ID NO: 1225 - protein, 5 aa, Artificial Sequence
  source: /note="Description of Artificial Sequence: Synthetic peptide"
SYAMS

SEQ ID NO: 1226 - protein, 5 aa, Artificial Sequence
  source: /note="Description of Artificial Sequence: Synthetic peptide"
DYAMH

SEQ ID NO: 1227 - protein, 5 aa, Artificial Sequence
  source: /note="Description of Artificial Sequence: Synthetic peptide"
DYAMH

SEQ ID NO: 1228 - protein, 5 aa, Artificial Sequence
  source: /note="Description of Artificial Sequence: Synthetic peptide"
SYAMS

SEQ ID NO: 1229 - protein, 5 aa, Artificial Sequence
  source: /note="Description of Artificial Sequence: Synthetic peptide"
SYAMS

SEQ ID NO: 1230 - protein, 5 aa, Artificial Sequence
  source: /note="Description of Artificial Sequence: Synthetic peptide"
SYAMS

SEQ ID NO: 1231 - protein, 5 aa, Artificial Sequence
  source: /note="Description of Artificial Sequence: Synthetic peptide"
SYAMS

SEQ ID NO: 1232 - protein, 5 aa, Artificial Sequence
  source: /note="Description of Artificial Sequence: Synthetic peptide"
SYAMS

SEQ ID NO: 1233 - protein, 5 aa, Artificial Sequence
  source: /note="Description of Artificial Sequence: Synthetic peptide"
SYAMS

SEQ ID NO: 1234 - protein, 5 aa, Artificial Sequence
  source: /note="Description of Artificial Sequence: Synthetic peptide"
SYAMS

SEQ ID NO: 1235 - protein, 5 aa, Artificial Sequence
  source: /note="Description of Artificial Sequence: Synthetic peptide"
NFGMN

SEQ ID NO: 1236 - protein, 5 aa, Artificial Sequence
  source: /note="Description of Artificial Sequence: Synthetic peptide"
DYSIN

SEQ ID NO: 1237 - protein, 5 aa, Artificial Sequence
  source: /note="Description of Artificial Sequence: Synthetic peptide"
HYSMN

SEQ ID NO: 1238 - protein, 5 aa, Artificial Sequence
  source: /note="Description of Artificial Sequence: Synthetic peptide"
HYSMN

SEQ ID NO: 1239 - protein, 16 aa, Artificial Sequence
  source: /note="Description of Artificial Sequence: Synthetic peptide"
GIVYSGSTYYAASVKG

SEQ ID NO: 1240 - protein, 17 aa, Artificial Sequence
  source: /note="Description of Artificial Sequence: Synthetic peptide"
GISRSGENTYYADSVKG

SEQ ID NO: 1241 - protein, 17 aa, Artificial Sequence
  source: /note="Description of Artificial Sequence: Synthetic peptide"
GISWNSGSIGYADSVKG

SEQ ID NO: 1242 - protein, 16 aa, Artificial Sequence
  source: /note="Description of Artificial Sequence: Synthetic peptide"
GIVYSGSTYYAASVKG

SEQ ID NO: 1243 - protein, 17 aa, Artificial Sequence
  source: /note="Description of Artificial Sequence: Synthetic peptide"
WINPKNNNTNYAQKFQG

SEQ ID NO: 1244 - protein, 17 aa, Artificial Sequence
  source: /note="Description of Artificial Sequence: Synthetic peptide"
VISGSGGTTYYADSVKG

SEQ ID NO: 1245 - protein, 17 aa, Artificial Sequence
  source: /note="Description of Artificial Sequence: Synthetic peptide"
WISAYNGNTNYAQKFQG

SEQ ID NO: 1246 - protein, 16 aa, Artificial Sequence
  source: /note="Description of Artificial Sequence: Synthetic peptide"
GIVYSGSTYYAASVKG

SEQ ID NO: 1247 - protein, 16 aa, Artificial Sequence
  source: /note="Description of Artificial Sequence: Synthetic peptide"
GIVYSGSTYYAASVKG

SEQ ID NO: 1248 - protein, 16 aa, Artificial Sequence
  source: /note="Description of Artificial Sequence: Synthetic peptide"
GIVYSGSTYYAASVKG

SEQ ID NO: 1249 - protein, 17 aa, Artificial Sequence
  source: /note="Description of Artificial Sequence: Synthetic peptide"
YISSSGSTIYYADSVKG

SEQ ID NO: 1250 - protein, 17 aa, Artificial Sequence
  source: /note="Description of Artificial Sequence: Synthetic peptide"
YISSSGNTIYYADSVKG

SEQ ID NO: 1251 - protein, 16 aa, Artificial Sequence
  source: /note="Description of Artificial Sequence: Synthetic peptide"
GIVYSGSTYYAASVKG

SEQ ID NO: 1252 - protein, 16 aa, Artificial Sequence
  source: /note="Description of Artificial Sequence: Synthetic peptide"
GIVYSGSTYYAASVKG

SEQ ID NO: 1253 - protein, 16 aa, Artificial Sequence
  source: /note="Description of Artificial Sequence: Synthetic peptide"
GIVYSGSTYYAASVKG

SEQ ID NO: 1254 - protein, 16 aa, Artificial Sequence
  source: /note="Description of Artificial Sequence: Synthetic peptide"
SIYYSGSAYYNPSLKS

SEQ ID NO: 1255 - protein, 16 aa, Artificial Sequence
  source: /note="Description of Artificial Sequence: Synthetic peptide"
RIDWDEDKFYSTSLKT

SEQ ID NO: 1256 - protein, 17 aa, Artificial Sequence
  source: /note="Description of Artificial Sequence: Synthetic peptide"
SISSSSSYIYYADSVKG

SEQ ID NO: 1257 - protein, 17 aa, Artificial Sequence
  source: /note="Description of Artificial Sequence: Synthetic peptide"
YISSSGSTIYYADSVKG

SEQ ID NO: 1258 - protein, 17 aa, Artificial Sequence
  source: /note="Description of Artificial Sequence: Synthetic peptide"
MINPSGGVTAYSQTLQG

SEQ ID NO: 1259 - protein, 16 aa, Artificial Sequence
  source: /note="Description of Artificial Sequence: Synthetic peptide"
YIYYSGSTYYNPSLKS

SEQ ID NO: 1260 - protein, 17 aa, Artificial Sequence
  source: /note="Description of Artificial Sequence: Synthetic peptide"
GIIPIFGTANYAQKFQG

SEQ ID NO: 1261 - protein, 18 aa, Artificial Sequence
  source: /note="Description of Artificial Sequence: Synthetic peptide"
RTYYRSKWYSFYAISLKS

SEQ ID NO: 1262 - protein, 17 aa, Artificial Sequence
  source: /note="Description of Artificial Sequence: Synthetic peptide"
AISGSGGSTYYADSVKG

SEQ ID NO: 1263 - protein, 17 aa, Artificial Sequence
  source: /note="Description of Artificial Sequence: Synthetic peptide"
GISDSGVSTYYADSAKG

SEQ ID NO: 1264 - protein, 17 aa, Artificial Sequence
  source: /note="Description of Artificial Sequence: Synthetic peptide"
AISGSGGSTYYADSVKG

SEQ ID NO: 1265 - protein, 17 aa, Artificial Sequence
  source: /note="Description of Artificial Sequence: Synthetic peptide"
AISGSGGSTYYADSVKG

SEQ ID NO: 1266 - protein, 17 aa, Artificial Sequence
  source: /note="Description of Artificial Sequence: Synthetic peptide"
GISWNSGSIGYADSVKG

SEQ ID NO: 1267 - protein, 17 aa, Artificial Sequence
  source: /note="Description of Artificial Sequence: Synthetic peptide"
SINWKGNSLAYGDSVKG

SEQ ID NO: 1268 - protein, 17 aa, Artificial Sequence
  source: /note="Description of Artificial Sequence: Synthetic peptide"
AISGSGGSTYYADSVKG

SEQ ID NO: 1269 - protein, 17 aa, Artificial Sequence
  source: /note="Description of Artificial Sequence: Synthetic peptide"
AISGSGGSTYYADSVKG

SEQ ID NO: 1270 - protein, 17 aa, Artificial Sequence
  source: /note="Description of Artificial Sequence: Synthetic peptide"
AISGSGGSTYYADSVKG

SEQ ID NO: 1271 - protein, 17 aa, Artificial Sequence
  source: /note="Description of Artificial Sequence: Synthetic peptide"
AISGSGGSTYYADSVKG

SEQ ID NO: 1272 - protein, 17 aa, Artificial Sequence
  source: /note="Description of Artificial Sequence: Synthetic peptide"
AISGSGGSTYYADSVKG

SEQ ID NO: 1273 - protein, 17 aa, Artificial Sequence
  source: /note="Description of Artificial Sequence: Synthetic peptide"
AISGSGGSTYYADSVKG

SEQ ID NO: 1274 - protein, 17 aa, Artificial Sequence
  source: /note="Description of Artificial Sequence: Synthetic peptide"
AISGSGGSTYYADSVKG

SEQ ID NO: 1275 - protein, 17 aa, Artificial Sequence
  source: /note="Description of Artificial Sequence: Synthetic peptide"
WINTYTGESYFADDFKG

SEQ ID NO: 1276 - protein, 17 aa, Artificial Sequence
  source: /note="Description of Artificial Sequence: Synthetic peptide"
WINTETREPAYAYDFRG

SEQ ID NO: 1277 - protein, 17 aa, Artificial Sequence
  source: /note="Description of Artificial Sequence: Synthetic peptide"
RINTESGVPIYADDFKG

SEQ ID NO: 1278 - protein, 17 aa, Artificial Sequence
  source: /note="Description of Artificial Sequence: Synthetic peptide"
RINTETGEPLYADDFKG

SEQ ID NO: 1279 - protein, 7 aa, Artificial Sequence
  source: /note="Description of Artificial Sequence: Synthetic peptide"
HGGESDV

SEQ ID NO: 1280 - protein, 11 aa, Artificial Sequence
  source: /note="Description of Artificial Sequence: Synthetic peptide"
SPAHYYGGMDV

SEQ ID NO: 1281 - protein, 6 aa, Artificial Sequence
  source: /note="Description of Artificial Sequence: Synthetic peptide"
HSFLAY

SEQ ID NO: 1282 - protein, 7 aa, Artificial Sequence
  source: /note="Description of Artificial Sequence: Synthetic peptide"
HGGESDV

SEQ ID NO: 1283 - protein, 11 aa, Artificial Sequence
  source: /note="Description of Artificial Sequence: Synthetic peptide"
GPYYYQSYMDV

SEQ ID NO: 1284 - protein, 14 aa, Artificial Sequence
  source: /note="Description of Artificial Sequence: Synthetic peptide"
LDSSGYYYARGPRY

SEQ ID NO: 1285 - protein, 9 aa, Artificial Sequence
  source: /note="Description of Artificial Sequence: Synthetic peptide"
GPYYYYMDV

SEQ ID NO: 1286 - protein, 7 aa, Artificial Sequence
  source: /note="Description of Artificial Sequence: Synthetic peptide"
HGGESDV

SEQ ID NO: 1287 - protein, 7 aa, Artificial Sequence
  source: /note="Description of Artificial Sequence: Synthetic peptide"
HGGESDV

SEQ ID NO: 1288 - protein, 7 aa, Artificial Sequence
  source: /note="Description of Artificial Sequence: Synthetic peptide"
HGGESDV

SEQ ID NO: 1289 - protein, 8 aa, Artificial Sequence
  source: /note="Description of Artificial Sequence: Synthetic peptide"
ESGDGMDV

SEQ ID NO: 1290 - protein, 8 aa, Artificial Sequence
  source: /note="Description of Artificial Sequence: Synthetic peptide"
STMVREDY

SEQ ID NO: 1291 - protein, 7 aa, Artificial Sequence
  source: /note="Description of Artificial Sequence: Synthetic peptide"
HGGESDV

SEQ ID NO: 1292 - protein, 7 aa, Artificial Sequence
  source: /note="Description of Artificial Sequence: Synthetic peptide"
HGGESDV

SEQ ID NO: 1293 - protein, 7 aa, Artificial Sequence
  source: /note="Description of Artificial Sequence: Synthetic peptide"
HGGESDV

SEQ ID NO: 1294 - protein, 11 aa, Artificial Sequence
  source: /note="Description of Artificial Sequence: Synthetic peptide"
HWQEWPDAFDI

SEQ ID NO: 1295 - protein, 13 aa, Artificial Sequence
  source: /note="Description of Artificial Sequence: Synthetic peptide"
SGAGGTSATAFDI

SEQ ID NO: 1296 - protein, 10 aa, Artificial Sequence
  source: /note="Description of Artificial Sequence: Synthetic peptide"
TIAAVYAFDI

SEQ ID NO: 1297 - protein, 8 aa, Artificial Sequence
  source: /note="Description of Artificial Sequence: Synthetic peptide"
DLRGAFDI

SEQ ID NO: 1298 - protein, 11 aa, Artificial Sequence
  source: /note="Description of Artificial Sequence: Synthetic peptide"
EGSGSGWYFDF

SEQ ID NO: 1299 - protein, 13 aa, Artificial Sequence
  source: /note="Description of Artificial Sequence: Synthetic peptide"
AGIAARLRGAFDI

SEQ ID NO: 1300 - protein, 20 aa, Artificial Sequence
  source: /note="Description of Artificial Sequence: Synthetic peptide"
RGGYQLLRWDVGLLRSAFDI

SEQ ID NO: 1301 - protein, 13 aa, Artificial Sequence
  source: /note="Description of Artificial Sequence: Synthetic peptide"
SSPEGLFLYWFDP

SEQ ID NO: 1302 - protein, 9 aa, Artificial Sequence
  source: /note="Description of Artificial Sequence: Synthetic peptide"
VEGSGSLDY

SEQ ID NO: 1303 - protein, 9 aa, Artificial Sequence
  source: /note="Description of Artificial Sequence: Synthetic peptide"
RAGSEASDI

SEQ ID NO: 1304 - protein, 15 aa, Artificial Sequence
  source: /note="Description of Artificial Sequence: Synthetic peptide"
ATYKRELRYYYGMDV

SEQ ID NO: 1305 - protein, 15 aa, Artificial Sequence
  source: /note="Description of Artificial Sequence: Synthetic peptide"
ATYKRELRYYYGMDV

SEQ ID NO: 1306 - protein, 8 aa, Artificial Sequence
  source: /note="Description of Artificial Sequence: Synthetic peptide"
VGKAVPDV

SEQ ID NO: 1307 - protein, 13 aa, Artificial Sequence
  source: /note="Description of Artificial Sequence: Synthetic peptide"
HQGVAYYNYAMDV

SEQ ID NO: 1308 - protein, 8 aa, Artificial Sequence
  source: /note="Description of Artificial Sequence: Synthetic peptide"
VVRDGMDV

SEQ ID NO: 1309 - protein, 9 aa, Artificial Sequence
  source: /note="Description of Artificial Sequence: Synthetic peptide"
IPQTGTFDY

SEQ ID NO: 1310 - protein, 15 aa, Artificial Sequence
  source: /note="Description of Artificial Sequence: Synthetic peptide"
ANYKRELRYYYGMDV

SEQ ID NO: 1311 - protein, 11 aa, Artificial Sequence
  source: /note="Description of Artificial Sequence: Synthetic peptide"
ALVGATGAFDI

SEQ ID NO: 1312 - protein, 8 aa, Artificial Sequence
  source: /note="Description of Artificial Sequence: Synthetic peptide"
WFGEGFDP

SEQ ID NO: 1313 - protein, 17 aa, Artificial Sequence
  source: /note="Description of Artificial Sequence: Synthetic peptide"
VGYDSSGYYRDYYGMDV

SEQ ID NO: 1314 - protein, 13 aa, Artificial Sequence
  source: /note="Description of Artificial Sequence: Synthetic peptide"
MGWSSGYLGAFDI

SEQ ID NO: 1315 - protein, 13 aa, Artificial Sequence
  source: /note="Description of Artificial Sequence: Synthetic peptide"
GEIYYGYDGGFAY

SEQ ID NO: 1316 - protein, 8 aa, Artificial Sequence
  source: /note="Description of Artificial Sequence: Synthetic peptide"
DYSYAMDY

SEQ ID NO: 1317 - protein, 8 aa, Artificial Sequence
  source: /note="Description of Artificial Sequence: Synthetic peptide"
DYLYSLDF

SEQ ID NO: 1318 - protein, 8 aa, Artificial Sequence
  source: /note="Description of Artificial Sequence: Synthetic peptide"
DYLYSCDY

SEQ ID NO: 1319 - protein, 11 aa, Artificial Sequence
  source: /note="Description of Artificial Sequence: Synthetic peptide"
RASQSISSYLN

SEQ ID NO: 1320 - protein, 12 aa, Artificial Sequence
  source: /note="Description of Artificial Sequence: Synthetic peptide"
RASQSISSSFLA

SEQ ID NO: 1321 - protein, 16 aa, Artificial Sequence
  source: /note="Description of Artificial Sequence: Synthetic peptide"
RSSQSLLHSNGYNYLD

SEQ ID NO: 1322 - protein, 16 aa, Artificial Sequence
  source: /note="Description of Artificial Sequence: Synthetic peptide"
KSSQSLLRNDGKTPLY

SEQ ID NO: 1323 - protein, 16 aa, Artificial Sequence
  source: /note="Description of Artificial Sequence: Synthetic peptide"
RSSQSLLHSNGYNYLN

SEQ ID NO: 1324 - protein, 11 aa, Artificial Sequence
  source: /note="Description of Artificial Sequence: Synthetic peptide"
RASQSISSYLN

SEQ ID NO: 1325 - protein, 16 aa, Artificial Sequence
  source: /note="Description of Artificial Sequence: Synthetic peptide"
RSSQSLLYSNGYNYVD

SEQ ID NO: 1326 - protein, 11 aa, Artificial Sequence
  source: /note="Description of Artificial Sequence: Synthetic peptide"
RASQSVSSNLA

SEQ ID NO: 1327 - protein, 11 aa, Artificial Sequence
  source: /note="Description of Artificial Sequence: Synthetic peptide"
RASQSVSSKLA

SEQ ID NO: 1328 - protein, 12 aa, Artificial Sequence
  source: /note="Description of Artificial Sequence: Synthetic peptide"
RASQSVGSTNLA

SEQ ID NO: 1329 - protein, 11 aa, Artificial Sequence
  source: /note="Description of Artificial Sequence: Synthetic peptide"
RASQSISSYLN

SEQ ID NO: 1330 - protein, 16 aa, Artificial Sequence
  source: /note="Description of Artificial Sequence: Synthetic peptide"
KSSESLVHNSGKTYLN

SEQ ID NO: 1331 - protein, 11 aa, Artificial Sequence
  source: /note="Description of Artificial Sequence: Synthetic peptide"
QASEDINKFLN

SEQ ID NO: 1332 - protein, 11 aa, Artificial Sequence
  source: /note="Description of Artificial Sequence: Synthetic peptide"
RASQSVGSNLA

SEQ ID NO: 1333 - protein, 12 aa, Artificial Sequence
  source: /note="Description of Artificial Sequence: Synthetic peptide"
RASQSIGSSSLA

SEQ ID NO: 1334 - protein, 11 aa, Artificial Sequence
  source: /note="Description of Artificial Sequence: Synthetic peptide"
KASQDIDDAMN

SEQ ID NO: 1335 - protein, 11 aa, Artificial Sequence
  source: /note="Description of Artificial Sequence: Synthetic peptide"
RASQDIYNNLA

SEQ ID NO: 1336 - protein, 16 aa, Artificial Sequence
  source: /note="Description of Artificial Sequence: Synthetic peptide"
RSSQSLLHSNGYNYLD

SEQ ID NO: 1337 - protein, 11 aa, Artificial Sequence
  source: /note="Description of Artificial Sequence: Synthetic peptide"
GGNNIGTKSVH

SEQ ID NO: 1338 - protein, 11 aa, Artificial Sequence
  source: /note="Description of Artificial Sequence: Synthetic peptide"
SGDGLSKKYVS

SEQ ID NO: 1339 - protein, 11 aa, Artificial Sequence
  source: /note="Description of Artificial Sequence: Synthetic peptide"
RASQGIRNWLA

SEQ ID NO: 1340 - protein, 11 aa, Artificial Sequence
  source: /note="Description of Artificial Sequence: Synthetic peptide"
GGNNIGSKSVH

SEQ ID NO: 1341 - protein, 11 aa, Artificial Sequence
  source: /note="Description of Artificial Sequence: Synthetic peptide"
QGDSLGNYYAT

SEQ ID NO: 1342 - protein, 12 aa, Artificial Sequence
  source: /note="Description of Artificial Sequence: Synthetic peptide"
RASQSVSSAYLA

SEQ ID NO: 1343 - protein, 11 aa, Artificial Sequence
  source: /note="Description of Artificial Sequence: Synthetic peptide"
RASQSVSNSLA

SEQ ID NO: 1344 - protein, 12 aa, Artificial Sequence
  source: /note="Description of Artificial Sequence: Synthetic peptide"
RASQSVSSSFLA

SEQ ID NO: 1345 - protein, 12 aa, Artificial Sequence
  source: /note="Description of Artificial Sequence: Synthetic peptide"
RASQSVSTTFLA

SEQ ID NO: 1346 - protein, 11 aa, Artificial Sequence
  source: /note="Description of Artificial Sequence: Synthetic peptide"
RASQSISSYLN

SEQ ID NO: 1347 - protein, 12 aa, Artificial Sequence
  source: /note="Description of Artificial Sequence: Synthetic peptide"
RATQSIGSSFLA

SEQ ID NO: 1348 - protein, 12 aa, Artificial Sequence
  source: /note="Description of Artificial Sequence: Synthetic peptide"
RASQSVSSSYLA

SEQ ID NO: 1349 - protein, 12 aa, Artificial Sequence
  source: /note="Description of Artificial Sequence: Synthetic peptide"
RASQSVSSSYLA

SEQ ID NO: 1350 - protein, 12 aa, Artificial Sequence
  source: /note="Description of Artificial Sequence: Synthetic peptide"
RASQRVASNYLA

SEQ ID NO: 1351 - protein, 12 aa, Artificial Sequence
  source: /note="Description of Artificial Sequence: Synthetic peptide"
RASQSLSSNFLA

SEQ ID NO: 1352 - protein, 16 aa, Artificial Sequence
  source: /note="Description of Artificial Sequence: Synthetic peptide"
RSSQSLLHSNGYNYLD

SEQ ID NO: 1353 - protein, 12 aa, Artificial Sequence
  source: /note="Description of Artificial Sequence: Synthetic peptide"
RASQSVSSSYLA

SEQ ID NO: 1354 - protein, 12 aa, Artificial Sequence
  source: /note="Description of Artificial Sequence: Synthetic peptide"
RASQSVASSFLA

SEQ ID NO: 1355 - protein, 11 aa, Artificial Sequence
  source: /note="Description of Artificial Sequence: Synthetic peptide"
RASQDVNTAVS

SEQ ID NO: 1356 - protein, 15 aa, Artificial Sequence
  source: /note="Description of Artificial Sequence: Synthetic peptide"
RASESVSVIGAHLIH

SEQ ID NO: 1357 - protein, 15 aa, Artificial Sequence
  source: /note="Description of Artificial Sequence: Synthetic peptide"
RASESVTILGSHLIY

SEQ ID NO: 1358 - protein, 15 aa, Artificial Sequence
  source: /note="Description of Artificial Sequence: Synthetic peptide"
RASESVTILGSHLIY

SEQ ID NO: 1359 - protein, 7 aa, Artificial Sequence
  source: /note="Description of Artificial Sequence: Synthetic peptide"
AASSLQS

SEQ ID NO: 1360 - protein, 7 aa, Artificial Sequence
  source: /note="Description of Artificial Sequence: Synthetic peptide"
GASRRAT

SEQ ID NO: 1361 - protein, 7 aa, Artificial Sequence
  source: /note="Description of Artificial Sequence: Synthetic peptide"
LGSNRAS

SEQ ID NO: 1362 - protein, 7 aa, Artificial Sequence
  source: /note="Description of Artificial Sequence: Synthetic peptide"
EVSNRFS

SEQ ID NO: 1363 - protein, 7 aa, Artificial Sequence
  source: /note="Description of Artificial Sequence: Synthetic peptide"
LGSKRAS

SEQ ID NO: 1364 - protein, 7 aa, Artificial Sequence
  source: /note="Description of Artificial Sequence: Synthetic peptide"
GASTLAS

SEQ ID NO: 1365 - protein, 7 aa, Artificial Sequence
  source: /note="Description of Artificial Sequence: Synthetic peptide"
LGSNRAS

SEQ ID NO: 1366 - protein, 7 aa, Artificial Sequence
  source: /note="Description of Artificial Sequence: Synthetic peptide"
GASTRAS

SEQ ID NO: 1367 - protein, 7 aa, Artificial Sequence
  source: /note="Description of Artificial Sequence: Synthetic peptide"
GASIRAT

SEQ ID NO: 1368 - protein, 7 aa, Artificial Sequence
  source: /note="Description of Artificial Sequence: Synthetic peptide"
DASNRAT

SEQ ID NO: 1369 - protein, 7 aa, Artificial Sequence
  source: /note="Description of Artificial Sequence: Synthetic peptide"
AASSLQS

SEQ ID NO: 1370 - protein, 7 aa, Artificial Sequence
  source: /note="Description of Artificial Sequence: Synthetic peptide"
EVSNRDS

SEQ ID NO: 1371 - protein, 7 aa, Artificial Sequence
  source: /note="Description of Artificial Sequence: Synthetic peptide"
DASTLQT

SEQ ID NO: 1372 - protein, 7 aa, Artificial Sequence
  source: /note="Description of Artificial Sequence: Synthetic peptide"
GASTRAT

SEQ ID NO: 1373 - protein, 7 aa, Artificial Sequence
  source: /note="Description of Artificial Sequence: Synthetic peptide"
GASSRAS

SEQ ID NO: 1374 - protein, 7 aa, Artificial Sequence
  source: /note="Description of Artificial Sequence: Synthetic peptide"
SATSPVP

SEQ ID NO: 1375 - protein, 7 aa, Artificial Sequence
  source: /note="Description of Artificial Sequence: Synthetic peptide"
AANKSQS

SEQ ID NO: 1376 - protein, 7 aa, Artificial Sequence
  source: /note="Description of Artificial Sequence: Synthetic peptide"
LGSNRAS

SEQ ID NO: 1377 - protein, 7 aa, Artificial Sequence
  source: /note="Description of Artificial Sequence: Synthetic peptide"
DDSVRPS

SEQ ID NO: 1378 - protein, 7 aa, Artificial Sequence
  source: /note="Description of Artificial Sequence: Synthetic peptide"
RDKERPS

SEQ ID NO: 1379 - protein, 7 aa, Artificial Sequence
  source: /note="Description of Artificial Sequence: Synthetic peptide"
AASNLQS

SEQ ID NO: 1380 - protein, 7 aa, Artificial Sequence
  source: /note="Description of Artificial Sequence: Synthetic peptide"
GKNNRPS

SEQ ID NO: 1381 - protein, 7 aa, Artificial Sequence
  source: /note="Description of Artificial Sequence: Synthetic peptide"
GTNNRPS

SEQ ID NO: 1382 - protein, 7 aa, Artificial Sequence
  source: /note="Description of Artificial Sequence: Synthetic peptide"
GASTRAT

SEQ ID NO: 1383 - protein, 7 aa, Artificial Sequence
  source: /note="Description of Artificial Sequence: Synthetic peptide"
DASSRAT

SEQ ID NO: 1384 - protein, 7 aa, Artificial Sequence
  source: /note="Description of Artificial Sequence: Synthetic peptide"
GASSRAT

SEQ ID NO: 1385 - protein, 7 aa, Artificial Sequence
  source: /note="Description of Artificial Sequence: Synthetic peptide"
GSSNRAT

SEQ ID NO: 1386 - protein, 7 aa, Artificial Sequence
  source: /note="Description of Artificial Sequence: Synthetic peptide"
AASSLQS

SEQ ID NO: 1387 - protein, 7 aa, Artificial Sequence
  source: /note="Description of Artificial Sequence: Synthetic peptide"
GASQRAT

SEQ ID NO: 1388 - protein, 7 aa, Artificial Sequence
  source: /note="Description of Artificial Sequence: Synthetic peptide"
GASSRAT

SEQ ID NO: 1389 - protein, 7 aa, Artificial Sequence
  source: /note="Description of Artificial Sequence: Synthetic peptide"
GASSRAT

SEQ ID NO: 1390 - protein, 7 aa, Artificial Sequence
  source: /note="Description of Artificial Sequence: Synthetic peptide"
GASSRAT

SEQ ID NO: 1391 - protein, 7 aa, Artificial Sequence
  source: /note="Description of Artificial Sequence: Synthetic peptide"
GASNWAT

SEQ ID NO: 1392 - protein, 7 aa, Artificial Sequence
  source: /note="Description of Artificial Sequence: Synthetic peptide"
LGSNRAS

SEQ ID NO: 1393 - protein, 7 aa, Artificial Sequence
  source: /note="Description of Artificial Sequence: Synthetic peptide"
GTSSRAT

SEQ ID NO: 1394 - protein, 7 aa, Artificial Sequence
  source: /note="Description of Artificial Sequence: Synthetic peptide"
GASGRAT

SEQ ID NO: 1395 - protein, 7 aa, Artificial Sequence
  source: /note="Description of Artificial Sequence: Synthetic peptide"
SASYRYT

SEQ ID NO: 1396 - protein, 7 aa, Artificial Sequence
  source: /note="Description of Artificial Sequence: Synthetic peptide"
LASNLET

SEQ ID NO: 1397 - protein, 7 aa, Artificial Sequence
  source: /note="Description of Artificial Sequence: Synthetic peptide"
LASNVQT

SEQ ID NO: 1398 - protein, 7 aa, Artificial Sequence
  source: /note="Description of Artificial Sequence: Synthetic peptide"
LASNVQT

SEQ ID NO: 1399 - protein, 9 aa, Artificial Sequence
  source: /note="Description of Artificial Sequence: Synthetic peptide"
QQSYSTPYT

SEQ ID NO: 1400 - protein, 10 aa, Artificial Sequence
  source: /note="Description of Artificial Sequence: Synthetic peptide"
QQYHSSPSWT

SEQ ID NO: 1401 - protein, 9 aa, Artificial Sequence
  source: /note="Description of Artificial Sequence: Synthetic peptide"
MQALQTPYT

SEQ ID NO: 1402 - protein, 8 aa, Artificial Sequence
  source: /note="Description of Artificial Sequence: Synthetic peptide"
MQNIQFPS

SEQ ID NO: 1403 - protein, 9 aa, Artificial Sequence
  source: /note="Description of Artificial Sequence: Synthetic peptide"
MQALQTPYT

SEQ ID NO: 1404 - protein, 8 aa, Artificial Sequence
  source: /note="Description of Artificial Sequence: Synthetic peptide"
QQSYKRAS

SEQ ID NO: 1405 - protein, 9 aa, Artificial Sequence
  source: /note="Description of Artificial Sequence: Synthetic peptide"
MQGRQFPYS

SEQ ID NO: 1406 - protein, 8 aa, Artificial Sequence
  source: /note="Description of Artificial Sequence: Synthetic peptide"
QQYGSSLT

SEQ ID NO: 1407 - protein, 9 aa, Artificial Sequence
  source: /note="Description of Artificial Sequence: Synthetic peptide"
QQYGSSSWT

SEQ ID NO: 1408 - protein, 10 aa, Artificial Sequence
  source: /note="Description of Artificial Sequence: Synthetic peptide"
QQYGSSPPWT

SEQ ID NO: 1409 - protein, 7 aa, Artificial Sequence
  source: /note="Description of Artificial Sequence: Synthetic peptide"
QQSYTLA

SEQ ID NO: 1410 - protein, 9 aa, Artificial Sequence
  source: /note="Description of Artificial Sequence: Synthetic peptide"
MQGTHWPGT

SEQ ID NO: 1411 - protein, 9 aa, Artificial Sequence
  source: /note="Description of Artificial Sequence: Synthetic peptide"
QQYESLPLT

SEQ ID NO: 1412 - protein, 10 aa, Artificial Sequence
  source: /note="Description of Artificial Sequence: Synthetic peptide"
QQYNDWLPVT

SEQ ID NO: 1413 - protein, 10 aa, Artificial Sequence
  source: /note="Description of Artificial Sequence: Synthetic peptide"
QQYAGSPPFT

SEQ ID NO: 1414 - protein, 9 aa, Artificial Sequence
  source: /note="Description of Artificial Sequence: Synthetic peptide"
LQHDNFPLT

SEQ ID NO: 1415 - protein, 9 aa, Artificial Sequence
  source: /note="Description of Artificial Sequence: Synthetic peptide"
QHYYRFPYS

SEQ ID NO: 1416 - protein, 9 aa, Artificial Sequence
  source: /note="Description of Artificial Sequence: Synthetic peptide"
MQALQTPYT

SEQ ID NO: 1417 - protein, 11 aa, Artificial Sequence
  source: /note="Description of Artificial Sequence: Synthetic peptide"
QVWDSDSEHVV

SEQ ID NO: 1418 - protein, 9 aa, Artificial Sequence
  source: /note="Description of Artificial Sequence: Synthetic peptide"
QAWDDTTVV

SEQ ID NO: 1419 - protein, 9 aa, Artificial Sequence
  source: /note="Description of Artificial Sequence: Synthetic peptide"
QKYNSAPFT

SEQ ID NO: 1420 - protein, 12 aa, Artificial Sequence
  source: /note="Description of Artificial Sequence: Synthetic peptide"
SSRDSSGDHLRV

SEQ ID NO: 1421 - protein, 11 aa, Artificial Sequence
  source: /note="Description of Artificial Sequence: Synthetic peptide"
NSRDSSGHHLL

SEQ ID NO: 1422 - protein, 14 aa, Artificial Sequence
  source: /note="Description of Artificial Sequence: Synthetic peptide"
QHYGSSFNGSSLFT

SEQ ID NO: 1423 - protein, 10 aa, Artificial Sequence
  source: /note="Description of Artificial Sequence: Synthetic peptide"
QQFGTSSGLT

SEQ ID NO: 1424 - protein, 10 aa, Artificial Sequence
  source: /note="Description of Artificial Sequence: Synthetic peptide"
QQYHSSPSWT

SEQ ID NO: 1425 - protein, 10 aa, Artificial Sequence
  source: /note="Description of Artificial Sequence: Synthetic peptide"
QQYHSSPSWT

SEQ ID NO: 1426 - protein, 9 aa, Artificial Sequence
  source: /note="Description of Artificial Sequence: Synthetic peptide"
QQSYSTPYS

SEQ ID NO: 1427 - protein, 10 aa, Artificial Sequence
  source: /note="Description of Artificial Sequence: Synthetic peptide"
QHYESSPSWT

SEQ ID NO: 1428 - protein, 10 aa, Artificial Sequence
  source: /note="Description of Artificial Sequence: Synthetic peptide"
QQYGSPPRFT

SEQ ID NO: 1429 - protein, 10 aa, Artificial Sequence
  source: /note="Description of Artificial Sequence: Synthetic peptide"
QHYGSSPSWT

SEQ ID NO: 1430 - protein, 10 aa, Artificial Sequence
  source: /note="Description of Artificial Sequence: Synthetic peptide"
QHYDSSPSWT

SEQ ID NO: 1431 - protein, 10 aa, Artificial Sequence
  source: /note="Description of Artificial Sequence: Synthetic peptide"
QYYGTSPMYT

SEQ ID NO: 1432 - protein, 9 aa, Artificial Sequence
  source: /note="Description of Artificial Sequence: Synthetic peptide"
MQALQTPLT

SEQ ID NO: 1433 - protein, 11 aa, Artificial Sequence
  source: /note="Description of Artificial Sequence: Synthetic peptide"
QHYGNSPPKFT

SEQ ID NO: 1434 - protein, 10 aa, Artificial Sequence
  source: /note="Description of Artificial Sequence: Synthetic peptide"
QHYGGSPRLT

SEQ ID NO: 1435 - protein, 9 aa, Artificial Sequence
  source: /note="Description of Artificial Sequence: Synthetic peptide"
QQHYSTPWT

SEQ ID NO: 1436 - protein, 9 aa, Artificial Sequence
  source: /note="Description of Artificial Sequence: Synthetic peptide"
LQSRIFPRT

SEQ ID NO: 1437 - protein, 9 aa, Artificial Sequence
  source: /note="Description of Artificial Sequence: Synthetic peptide"
LQSRTIPRT

SEQ ID NO: 1438 - protein, 9 aa, Artificial Sequence
  source: /note="Description of Artificial Sequence: Synthetic peptide"
LQSRTIPRT

SEQ ID NO: 1439 - protein, 7 aa, Artificial Sequence
  source: /note="Description of Artificial Sequence: Synthetic peptide"
GFALSNH

SEQ ID NO: 1440 - protein, 7 aa, Artificial Sequence
  source: /note="Description of Artificial Sequence: Synthetic peptide"
GFTFSNY

SEQ ID NO: 1441 - protein, 7 aa, Artificial Sequence
  source: /note="Description of Artificial Sequence: Synthetic peptide"
GFTFDDY

SEQ ID NO: 1442 - protein, 7 aa, Artificial Sequence
  source: /note="Description of Artificial Sequence: Synthetic peptide"
GFALSNH

SEQ ID NO: 1443 - protein, 7 aa, Artificial Sequence
  source: /note="Description of Artificial Sequence: Synthetic peptide"
GYIFDNF

SEQ ID NO: 1444 - protein, 7 aa, Artificial Sequence
  source: /note="Description of Artificial Sequence: Synthetic peptide"
GFTFSSD

SEQ ID NO: 1445 - protein, 7 aa, Artificial Sequence
  source: /note="Description of Artificial Sequence: Synthetic peptide"
GYTFSNY

SEQ ID NO: 1446 - protein, 7 aa, Artificial Sequence
  source: /note="Description of Artificial Sequence: Synthetic peptide"
GFALSNH

SEQ ID NO: 1447 - protein, 7 aa, Artificial Sequence
  source: /note="Description of Artificial Sequence: Synthetic peptide"
GFALSNH

SEQ ID NO: 1448 - protein, 7 aa, Artificial Sequence
  source: /note="Description of Artificial Sequence: Synthetic peptide"
GFALSNH

SEQ ID NO: 1449 - protein, 7 aa, Artificial Sequence
  source: /note="Description of Artificial Sequence: Synthetic peptide"
GFTFSDY

SEQ ID NO: 1450 - protein, 7 aa, Artificial Sequence
  source: /note="Description of Artificial Sequence: Synthetic peptide"
GFTFSDY

SEQ ID NO: 1451 - protein, 7 aa, Artificial Sequence
  source: /note="Description of Artificial Sequence: Synthetic peptide"
GFALSNH

SEQ ID NO: 1452 - protein, 7 aa, Artificial Sequence
  source: /note="Description of Artificial Sequence: Synthetic peptide"
GFALSNH

SEQ ID NO: 1453 - protein, 7 aa, Artificial Sequence
  source: /note="Description of Artificial Sequence: Synthetic peptide"
GFALSNH

SEQ ID NO: 1454 - protein, 9 aa, Artificial Sequence
  source: /note="Description of Artificial Sequence: Synthetic peptide"
GGSISSSYY

SEQ ID NO: 1455 - protein, 9 aa, Artificial Sequence
  source: /note="Description of Artificial Sequence: Synthetic peptide"
GFSLRTSGM

SEQ ID NO: 1456 - protein, 7 aa, Artificial Sequence
  source: /note="Description of Artificial Sequence: Synthetic peptide"
GFTFSSY

SEQ ID NO: 1457 - protein, 7 aa, Artificial Sequence
  source: /note="Description of Artificial Sequence: Synthetic peptide"
GFTFSDY

SEQ ID NO: 1458 - protein, 7 aa, Artificial Sequence
  source: /note="Description of Artificial Sequence: Synthetic peptide"
GYTVTSH

SEQ ID NO: 1459 - protein, 9 aa, Artificial Sequence
  source: /note="Description of Artificial Sequence: Synthetic peptide"
GGSISSGGY

SEQ ID NO: 1460 - protein, 7 aa, Artificial Sequence
  source: /note="Description of Artificial Sequence: Synthetic peptide"
GGTFSSY

SEQ ID NO: 1461 - protein, 9 aa, Artificial Sequence
  source: /note="Description of Artificial Sequence: Synthetic peptide"
GDSVSSNSA

SEQ ID NO: 1462 - protein, 7 aa, Artificial Sequence
  source: /note="Description of Artificial Sequence: Synthetic peptide"
GFTFSSY

SEQ ID NO: 1463 - protein, 7 aa, Artificial Sequence
  source: /note="Description of Artificial Sequence: Synthetic peptide"
GITFSRY

SEQ ID NO: 1464 - protein, 7 aa, Artificial Sequence
  source: /note="Description of Artificial Sequence: Synthetic peptide"
GFTFSSY

SEQ ID NO: 1465 - protein, 7 aa, Artificial Sequence
  source: /note="Description of Artificial Sequence: Synthetic peptide"
GFTFSSY

SEQ ID NO: 1466 - protein, 7 aa, Artificial Sequence
  source: /note="Description of Artificial Sequence: Synthetic peptide"
GFTFDDY

SEQ ID NO: 1467 - protein, 7 aa, Artificial Sequence
  source: /note="Description of Artificial Sequence: Synthetic peptide"
GFTFDDY

SEQ ID NO: 1468 - protein, 7 aa, Artificial Sequence
  source: /note="Description of Artificial Sequence: Synthetic peptide"
GFTFSSY

SEQ ID NO: 1469 - protein, 7 aa, Artificial Sequence
  source: /note="Description of Artificial Sequence: Synthetic peptide"
GFTFSSY

SEQ ID NO: 1470 - protein, 7 aa, Artificial Sequence
  source: /note="Description of Artificial Sequence: Synthetic peptide"
GFTFSSY

SEQ ID NO: 1471 - protein, 7 aa, Artificial Sequence
  source: /note="Description of Artificial Sequence: Synthetic peptide"
GFSFSSY

SEQ ID NO: 1472 - protein, 7 aa, Artificial Sequence
  source: /note="Description of Artificial Sequence: Synthetic peptide"
GFTFSSY

SEQ ID NO: 1473 - protein, 7 aa, Artificial Sequence
  source: /note="Description of Artificial Sequence: Synthetic peptide"
GFTFSSY

SEQ ID NO: 1474 - protein, 7 aa, Artificial Sequence
  source: /note="Description of Artificial Sequence: Synthetic peptide"
GFTFSSY

SEQ ID NO: 1475 - protein, 7 aa, Artificial Sequence
  source: /note="Description of Artificial Sequence: Synthetic peptide"
GYTFTNF

SEQ ID NO: 1476 - protein, 7 aa, Artificial Sequence
  source: /note="Description of Artificial Sequence: Synthetic peptide"
GYTFTDY

SEQ ID NO: 1477 - protein, 7 aa, Artificial Sequence
  source: /note="Description of Artificial Sequence: Synthetic peptide"
GYTFRHY

SEQ ID NO: 1478 - protein, 7 aa, Artificial Sequence
  source: /note="Description of Artificial Sequence: Synthetic peptide"
GYTFTHY

SEQ ID NO: 1479 - protein, 5 aa, Artificial Sequence
  source: /note="Description of Artificial Sequence: Synthetic peptide"
VYSGS

SEQ ID NO: 1480 - protein, 6 aa, Artificial Sequence
  source: /note="Description of Artificial Sequence: Synthetic peptide"
SRSGEN

SEQ ID NO: 1481 - protein, 6 aa, Artificial Sequence
  source: /note="Description of Artificial Sequence: Synthetic peptide"
SWNSGS

SEQ ID NO: 1482 - protein, 5 aa, Artificial Sequence
  source: /note="Description of Artificial Sequence: Synthetic peptide"
VYSGS

SEQ ID NO: 1483 - protein, 6 aa, Artificial Sequence
  source: /note="Description of Artificial Sequence: Synthetic peptide"
NPKNNN

SEQ ID NO: 1484 - protein, 6 aa, Artificial Sequence
  source: /note="Description of Artificial Sequence: Synthetic peptide"
SGSGGT

SEQ ID NO: 1485 - protein, 6 aa, Artificial Sequence
  source: /note="Description of Artificial Sequence: Synthetic peptide"
SAYNGN

SEQ ID NO: 1486 - protein, 5 aa, Artificial Sequence
  source: /note="Description of Artificial Sequence: Synthetic peptide"
VYSGS

SEQ ID NO: 1487 - protein, 5 aa, Artificial Sequence
  source: /note="Description of Artificial Sequence: Synthetic peptide"
VYSGS

SEQ ID NO: 1488 - protein, 5 aa, Artificial Sequence
  source: /note="Description of Artificial Sequence: Synthetic peptide"
VYSGS

SEQ ID NO: 1489 - protein, 6 aa, Artificial Sequence
  source: /note="Description of Artificial Sequence: Synthetic peptide"
SSSGST

SEQ ID NO: 1490 - protein, 6 aa, Artificial Sequence
  source: /note="Description of Artificial Sequence: Synthetic peptide"
SSSGNT

SEQ ID NO: 1491 - protein, 5 aa, Artificial Sequence
  source: /note="Description of Artificial Sequence: Synthetic peptide"
VYSGS

SEQ ID NO: 1492 - protein, 5 aa, Artificial Sequence
  source: /note="Description of Artificial Sequence: Synthetic peptide"
VYSGS

SEQ ID NO: 1493 - protein, 5 aa, Artificial Sequence
  source: /note="Description of Artificial Sequence: Synthetic peptide"
VYSGS

SEQ ID NO: 1494 - protein, 5 aa, Artificial Sequence
  source: /note="Description of Artificial Sequence: Synthetic peptide"
YYSGS

SEQ ID NO: 1495 - protein, 5 aa, Artificial Sequence
  source: /note="Description of Artificial Sequence: Synthetic peptide"
DWDED

SEQ ID NO: 1496 - protein, 6 aa, Artificial Sequence
  source: /note="Description of Artificial Sequence: Synthetic peptide"
SSSSSY

SEQ ID NO: 1497 - protein, 6 aa, Artificial Sequence
  source: /note="Description of Artificial Sequence: Synthetic peptide"
SSSGST

SEQ ID NO: 1498 - protein, 6 aa, Artificial Sequence
  source: /note="Description of Artificial Sequence: Synthetic peptide"
NPSGGV

SEQ ID NO: 1499 - protein, 5 aa, Artificial Sequence
  source: /note="Description of Artificial Sequence: Synthetic peptide"
YYSGS

SEQ ID NO: 1500 - protein, 6 aa, Artificial Sequence
  source: /note="Description of Artificial Sequence: Synthetic peptide"
IPIFGT

SEQ ID NO: 1501 - protein, 7 aa, Artificial Sequence
  source: /note="Description of Artificial Sequence: Synthetic peptide"
YYRSKWY

SEQ ID NO: 1502 - protein, 6 aa, Artificial Sequence
  source: /note="Description of Artificial Sequence: Synthetic peptide"
SGSGGS

SEQ ID NO: 1503 - protein, 6 aa, Artificial Sequence
  source: /note="Description of Artificial Sequence: Synthetic peptide"
SDSGVS

SEQ ID NO: 1504 - protein, 6 aa, Artificial Sequence
  source: /note="Description of Artificial Sequence: Synthetic peptide"
SGSGGS

SEQ ID NO: 1505 - protein, 6 aa, Artificial Sequence
  source: /note="Description of Artificial Sequence: Synthetic peptide"
SGSGGS

SEQ ID NO: 1506 - protein, 6 aa, Artificial Sequence
  source: /note="Description of Artificial Sequence: Synthetic peptide"
SWNSGS

SEQ ID NO: 1507 - protein, 6 aa, Artificial Sequence
  source: /note="Description of Artificial Sequence: Synthetic peptide"
NWKGNS

SEQ ID NO: 1508 - protein, 6 aa, Artificial Sequence
  source: /note="Description of Artificial Sequence: Synthetic peptide"
SGSGGS

SEQ ID NO: 1509 - protein, 6 aa, Artificial Sequence
  source: /note="Description of Artificial Sequence: Synthetic peptide"
SGSGGS

SEQ ID NO: 1510 - protein, 6 aa, Artificial Sequence
  source: /note="Description of Artificial Sequence: Synthetic peptide"
SGSGGS

SEQ ID NO: 1511 - protein, 6 aa, Artificial Sequence
  source: /note="Description of Artificial Sequence: Synthetic peptide"
SGSGGS

SEQ ID NO: 1512 - protein, 6 aa, Artificial Sequence
  source: /note="Description of Artificial Sequence: Synthetic peptide"
SGSGGS

SEQ ID NO: 1513 - protein, 6 aa, Artificial Sequence
  source: /note="Description of Artificial Sequence: Synthetic peptide"
SGSGGS

SEQ ID NO: 1514 - protein, 6 aa, Artificial Sequence
  source: /note="Description of Artificial Sequence: Synthetic peptide"
SGSGGS

SEQ ID NO: 1515 - protein, 6 aa, Artificial Sequence
  source: /note="Description of Artificial Sequence: Synthetic peptide"
NTYTGE

SEQ ID NO: 1516 - protein, 6 aa, Artificial Sequence
  source: /note="Description of Artificial Sequence: Synthetic peptide"
NTETRE

SEQ ID NO: 1517 - protein, 6 aa, Artificial Sequence
  source: /note="Description of Artificial Sequence: Synthetic peptide"
NTESGV

SEQ ID NO: 1518 - protein, 6 aa, Artificial Sequence
  source: /note="Description of Artificial Sequence: Synthetic peptide"
NTETGE

SEQ ID NO: 1519 - protein, 7 aa, Artificial Sequence
  source: /note="Description of Artificial Sequence: Synthetic peptide"
HGGESDV

SEQ ID NO: 1520 - protein, 11 aa, Artificial Sequence
  source: /note="Description of Artificial Sequence: Synthetic peptide"
SPAHYYGGMDV

SEQ ID NO: 1521 - protein, 6 aa, Artificial Sequence
  source: /note="Description of Artificial Sequence: Synthetic peptide"
HSFLAY

SEQ ID NO: 1522 - protein, 7 aa, Artificial Sequence
  source: /note="Description of Artificial Sequence: Synthetic peptide"
HGGESDV

SEQ ID NO: 1523 - protein, 11 aa, Artificial Sequence
  source: /note="Description of Artificial Sequence: Synthetic peptide"
GPYYYQSYMDV

SEQ ID NO: 1524 - protein, 14 aa, Artificial Sequence
  source: /note="Description of Artificial Sequence: Synthetic peptide"
LDSSGYYYARGPRY

SEQ ID NO: 1525 - protein, 9 aa, Artificial Sequence
  source: /note="Description of Artificial Sequence: Synthetic peptide"
GPYYYYMDV

SEQ ID NO: 1526 - protein, 7 aa, Artificial Sequence
  source: /note="Description of Artificial Sequence: Synthetic peptide"
HGGESDV

SEQ ID NO: 1527 - protein, 7 aa, Artificial Sequence
  source: /note="Description of Artificial Sequence: Synthetic peptide"
HGGESDV

SEQ ID NO: 1528 - protein, 7 aa, Artificial Sequence
  source: /note="Description of Artificial Sequence: Synthetic peptide"
HGGESDV

SEQ ID NO: 1529 - protein, 8 aa, Artificial Sequence
  source: /note="Description of Artificial Sequence: Synthetic peptide"
ESGDGMDV

SEQ ID NO: 1530 - protein, 8 aa, Artificial Sequence
  source: /note="Description of Artificial Sequence: Synthetic peptide"
STMVREDY

SEQ ID NO: 1531 - protein, 7 aa, Artificial Sequence
  source: /note="Description of Artificial Sequence: Synthetic peptide"
HGGESDV

SEQ ID NO: 1532 - protein, 7 aa, Artificial Sequence
  source: /note="Description of Artificial Sequence: Synthetic peptide"
HGGESDV

SEQ ID NO: 1533 - protein, 7 aa, Artificial Sequence
  source: /note="Description of Artificial Sequence: Synthetic peptide"
HGGESDV

SEQ ID NO: 1534 - protein, 11 aa, Artificial Sequence
  source: /note="Description of Artificial Sequence: Synthetic peptide"
HWQEWPDAFDI

SEQ ID NO: 1535 - protein, 13 aa, Artificial Sequence
  source: /note="Description of Artificial Sequence: Synthetic peptide"
SGAGGTSATAFDI

SEQ ID NO: 1536 - protein, 10 aa, Artificial Sequence
  source: /note="Description of Artificial Sequence: Synthetic peptide"
TIAAVYAFDI

SEQ ID NO: 1537 - protein, 8 aa, Artificial Sequence
  source: /note="Description of Artificial Sequence: Synthetic peptide"
DLRGAFDI

SEQ ID NO: 1538 - protein, 11 aa, Artificial Sequence
  source: /note="Description of Artificial Sequence: Synthetic peptide"
EGSGSGWYFDF

SEQ ID NO: 1539 - protein, 13 aa, Artificial Sequence
  source: /note="Description of Artificial Sequence: Synthetic peptide"
AGIAARLRGAFDI

SEQ ID NO: 1540 - protein, 20 aa, Artificial Sequence
  source: /note="Description of Artificial Sequence: Synthetic peptide"
RGGYQLLRWDVGLLRSAFDI

SEQ ID NO: 1541 - protein, 13 aa, Artificial Sequence
  source: /note="Description of Artificial Sequence: Synthetic peptide"
SSPEGLFLYWFDP

SEQ ID NO: 1542 - protein, 9 aa, Artificial Sequence
  source: /note="Description of Artificial Sequence: Synthetic peptide"
VEGSGSLDY

SEQ ID NO: 1543 - protein, 9 aa, Artificial Sequence
  source: /note="Description of Artificial Sequence: Synthetic peptide"
RAGSEASDI

SEQ ID NO: 1544 - protein, 15 aa, Artificial Sequence
  source: /note="Description of Artificial Sequence: Synthetic peptide"
ATYKRELRYYYGMDV

SEQ ID NO: 1545 - protein, 15 aa, Artificial Sequence
  source: /note="Description of Artificial Sequence: Synthetic peptide"
ATYKRELRYYYGMDV

SEQ ID NO: 1546 - protein, 8 aa, Artificial Sequence
  source: /note="Description of Artificial Sequence: Synthetic peptide"
VGKAVPDV

SEQ ID NO: 1547 - protein, 13 aa, Artificial Sequence
  source: /note="Description of Artificial Sequence: Synthetic peptide"
HQGVAYYNYAMDV

SEQ ID NO: 1548 - protein, 8 aa, Artificial Sequence
  source: /note="Description of Artificial Sequence: Synthetic peptide"
VVRDGMDV

SEQ ID NO: 1549 - protein, 9 aa, Artificial Sequence
  source: /note="Description of Artificial Sequence: Synthetic peptide"
IPQTGTFDY

SEQ ID NO: 1550 - protein, 15 aa, Artificial Sequence
  source: /note="Description of Artificial Sequence: Synthetic peptide"
ANYKRELRYYYGMDV

SEQ ID NO: 1551 - protein, 11 aa, Artificial Sequence
  source: /note="Description of Artificial Sequence: Synthetic peptide"
ALVGATGAFDI

SEQ ID NO: 1552 - protein, 8 aa, Artificial Sequence
  source: /note="Description of Artificial Sequence: Synthetic peptide"
WFGEGFDP

SEQ ID NO: 1553 - protein, 17 aa, Artificial Sequence
  source: /note="Description of Artificial Sequence: Synthetic peptide"
VGYDSSGYYRDYYGMDV

SEQ ID NO: 1554 - protein, 13 aa, Artificial Sequence
  source: /note="Description of Artificial Sequence: Synthetic peptide"
MGWSSGYLGAFDI

SEQ ID NO: 1555 - protein, 13 aa, Artificial Sequence
  source: /note="Description of Artificial Sequence: Synthetic peptide"
GEIYYGYDGGFAY

SEQ ID NO: 1556 - protein, 8 aa, Artificial Sequence
  source: /note="Description of Artificial Sequence: Synthetic peptide"
DYSYAMDY

SEQ ID NO: 1557 - protein, 8 aa, Artificial Sequence
  source: /note="Description of Artificial Sequence: Synthetic peptide"
DYLYSLDF

SEQ ID NO: 1558 - protein, 8 aa, Artificial Sequence
  source: /note="Description of Artificial Sequence: Synthetic peptide"
DYLYSCDY

SEQ ID NO: 1559 - protein, 7 aa, Artificial Sequence
  source: /note="Description of Artificial Sequence: Synthetic peptide"
SQSISSY

SEQ ID NO: 1560 - protein, 8 aa, Artificial Sequence
  source: /note="Description of Artificial Sequence: Synthetic peptide"
SQSISSSF

SEQ ID NO: 1561 - protein, 12 aa, Artificial Sequence
  source: /note="Description of Artificial Sequence: Synthetic peptide"
SQSLLHSNGYNY

SEQ ID NO: 1562 - protein, 12 aa, Artificial Sequence
  source: /note="Description of Artificial Sequence: Synthetic peptide"
SQSLLRNDGKTP

SEQ ID NO: 1563 - protein, 12 aa, Artificial Sequence
  source: /note="Description of Artificial Sequence: Synthetic peptide"
SQSLLHSNGYNY

SEQ ID NO: 1564 - protein, 7 aa, Artificial Sequence
  source: /note="Description of Artificial Sequence: Synthetic peptide"
SQSISSY

SEQ ID NO: 1565 - protein, 12 aa, Artificial Sequence
  source: /note="Description of Artificial Sequence: Synthetic peptide"
SQSLLYSNGYNY

SEQ ID NO: 1566 - protein, 7 aa, Artificial Sequence
  source: /note="Description of Artificial Sequence: Synthetic peptide"
SQSVSSN

SEQ ID NO: 1567 - protein, 7 aa, Artificial Sequence
  source: /note="Description of Artificial Sequence: Synthetic peptide"
SQSVSSK

SEQ ID NO: 1568 - protein, 8 aa, Artificial Sequence
  source: /note="Description of Artificial Sequence: Synthetic peptide"
SQSVGSTN

SEQ ID NO: 1569 - protein, 7 aa, Artificial Sequence
  source: /note="Description of Artificial Sequence: Synthetic peptide"
SQSISSY

SEQ ID NO: 1570 - protein, 12 aa, Artificial Sequence
  source: /note="Description of Artificial Sequence: Synthetic peptide"
SESLVHNSGKTY

SEQ ID NO: 1571 - protein, 7 aa, Artificial Sequence
  source: /note="Description of Artificial Sequence: Synthetic peptide"
SEDINKF

SEQ ID NO: 1572 - protein, 7 aa, Artificial Sequence
  source: /note="Description of Artificial Sequence: Synthetic peptide"
SQSVGSN

SEQ ID NO: 1573 - protein, 8 aa, Artificial Sequence
  source: /note="Description of Artificial Sequence: Synthetic peptide"
SQSIGSSS

SEQ ID NO: 1574 - protein, 7 aa, Artificial Sequence
  source: /note="Description of Artificial Sequence: Synthetic peptide"
SQDIDDA

SEQ ID NO: 1575 - protein, 7 aa, Artificial Sequence
  source: /note="Description of Artificial Sequence: Synthetic peptide"
SQDIYNN

SEQ ID NO: 1576 - protein, 12 aa, Artificial Sequence
  source: /note="Description of Artificial Sequence: Synthetic peptide"
SQSLLHSNGYNY

SEQ ID NO: 1577 - protein, 7 aa, Artificial Sequence
  source: /note="Description of Artificial Sequence: Synthetic peptide"
NNIGTKS

SEQ ID NO: 1578 - protein, 7 aa, Artificial Sequence
  source: /note="Description of Artificial Sequence: Synthetic peptide"
DGLSKKY

SEQ ID NO: 1579 - protein, 7 aa, Artificial Sequence
  source: /note="Description of Artificial Sequence: Synthetic peptide"
SQGIRNW

SEQ ID NO: 1580 - protein, 7 aa, Artificial Sequence
  source: /note="Description of Artificial Sequence: Synthetic peptide"
NNIGSKS

SEQ ID NO: 1581 - protein, 7 aa, Artificial Sequence
  source: /note="Description of Artificial Sequence: Synthetic peptide"
DSLGNYY

SEQ ID NO: 1582 - protein, 8 aa, Artificial Sequence
  source: /note="Description of Artificial Sequence: Synthetic peptide"
SQSVSSAY

SEQ ID NO: 1583 - protein, 7 aa, Artificial Sequence
  source: /note="Description of Artificial Sequence: Synthetic peptide"
SQSVSNS

SEQ ID NO: 1584 - protein, 8 aa, Artificial Sequence
  source: /note="Description of Artificial Sequence: Synthetic peptide"
SQSVSSSF

SEQ ID NO: 1585 - protein, 8 aa, Artificial Sequence
  source: /note="Description of Artificial Sequence: Synthetic peptide"
SQSVSTTF

SEQ ID NO: 1586 - protein, 7 aa, Artificial Sequence
  source: /note="Description of Artificial Sequence: Synthetic peptide"
SQSISSY

SEQ ID NO: 1587 - protein, 8 aa, Artificial Sequence
  source: /note="Description of Artificial Sequence: Synthetic peptide"
TQSIGSSF

SEQ ID NO: 1588 - protein, 8 aa, Artificial Sequence
  source: /note="Description of Artificial Sequence: Synthetic peptide"
SQSVSSSY

SEQ ID NO: 1589 - protein, 8 aa, Artificial Sequence
  source: /note="Description of Artificial Sequence: Synthetic peptide"
SQSVSSSY

SEQ ID NO: 1590 - protein, 8 aa, Artificial Sequence
  source: /note="Description of Artificial Sequence: Synthetic peptide"
SQRVASNY

SEQ ID NO: 1591 - protein, 8 aa, Artificial Sequence
  source: /note="Description of Artificial Sequence: Synthetic peptide"
SQSLSSNF

SEQ ID NO: 1592 - protein, 12 aa, Artificial Sequence
  source: /note="Description of Artificial Sequence: Synthetic peptide"
SQSLLHSNGYNY

SEQ ID NO: 1593 - protein, 8 aa, Artificial Sequence
  source: /note="Description of Artificial Sequence: Synthetic peptide"
SQSVSSSY

SEQ ID NO: 1594 - protein, 8 aa, Artificial Sequence
  source: /note="Description of Artificial Sequence: Synthetic peptide"
SQSVASSF

SEQ ID NO: 1595 - protein, 7 aa, Artificial Sequence
  source: /note="Description of Artificial Sequence: Synthetic peptide"
SQDVNTA

SEQ ID NO: 1596 - protein, 11 aa, Artificial Sequence
  source: /note="Description of Artificial Sequence: Synthetic peptide"
SESVSVIGAHL

SEQ ID NO: 1597 - protein, 11 aa, Artificial Sequence
  source: /note="Description of Artificial Sequence: Synthetic peptide"
SESVTILGSHL

SEQ ID NO: 1598 - protein, 11 aa, Artificial Sequence
  source: /note="Description of Artificial Sequence: Synthetic peptide"
SESVTILGSHL

SEQ ID NO: 1599 - protein, 3 aa, Artificial Sequence
  source: /note="Description of Artificial Sequence: Synthetic peptide"
AAS

SEQ ID NO: 1600 - protein, 3 aa, Artificial Sequence
  source: /note="Description of Artificial Sequence: Synthetic peptide"
GAS

SEQ ID NO: 1601 - protein, 3 aa, Artificial Sequence
  source: /note="Description of Artificial Sequence: Synthetic peptide"
LGS

SEQ ID NO: 1602 - protein, 3 aa, Artificial Sequence
  source: /note="Description of Artificial Sequence: Synthetic peptide"
EVS

SEQ ID NO: 1603 - protein, 3 aa, Artificial Sequence
  source: /note="Description of Artificial Sequence: Synthetic peptide"
LGS

SEQ ID NO: 1604 - protein, 3 aa, Artificial Sequence
  source: /note="Description of Artificial Sequence: Synthetic peptide"
GAS

SEQ ID NO: 1605 - protein, 3 aa, Artificial Sequence
  source: /note="Description of Artificial Sequence: Synthetic peptide"
LGS

SEQ ID NO: 1606 - protein, 3 aa, Artificial Sequence
  source: /note="Description of Artificial Sequence: Synthetic peptide"
GAS

SEQ ID NO: 1607 - protein, 3 aa, Artificial Sequence
  source: /note="Description of Artificial Sequence: Synthetic peptide"
GAS

SEQ ID NO: 1608 - protein, 3 aa, Artificial Sequence
  source: /note="Description of Artificial Sequence: Synthetic peptide"
DAS

SEQ ID NO: 1609 - protein, 3 aa, Artificial Sequence
  source: /note="Description of Artificial Sequence: Synthetic peptide"
AAS

SEQ ID NO: 1610 - protein, 3 aa, Artificial Sequence
  source: /note="Description of Artificial Sequence: Synthetic peptide"
EVS

SEQ ID NO: 1611 - protein, 3 aa, Artificial Sequence
  source: /note="Description of Artificial Sequence: Synthetic peptide"
DAS

SEQ ID NO: 1612 - protein, 3 aa, Artificial Sequence
  source: /note="Description of Artificial Sequence: Synthetic peptide"
GAS

SEQ ID NO: 1613 - protein, 3 aa, Artificial Sequence
  source: /note="Description of Artificial Sequence: Synthetic peptide"
GAS

SEQ ID NO: 1614 - protein, 3 aa, Artificial Sequence
  source: /note="Description of Artificial Sequence: Synthetic peptide"
SAT

SEQ ID NO: 1615 - protein, 3 aa, Artificial Sequence
  source: /note="Description of Artificial Sequence: Synthetic peptide"
AAN

SEQ ID NO: 1616 - protein, 3 aa, Artificial Sequence
  source: /note="Description of Artificial Sequence: Synthetic peptide"
LGS

SEQ ID NO: 1617 - protein, 3 aa, Artificial Sequence
  source: /note="Description of Artificial Sequence: Synthetic peptide"
DDS

SEQ ID NO: 1618 - protein, 3 aa, Artificial Sequence
  source: /note="Description of Artificial Sequence: Synthetic peptide"
RDK

SEQ ID NO: 1619 - protein, 3 aa, Artificial Sequence
  source: /note="Description of Artificial Sequence: Synthetic peptide"
AAS

SEQ ID NO: 1620 - protein, 3 aa, Artificial Sequence
  source: /note="Description of Artificial Sequence: Synthetic peptide"
GKN

SEQ ID NO: 1621 - protein, 3 aa, Artificial Sequence
  source: /note="Description of Artificial Sequence: Synthetic peptide"
GTN

SEQ ID NO: 1622 - protein, 3 aa, Artificial Sequence
  source: /note="Description of Artificial Sequence: Synthetic peptide"
GAS

SEQ ID NO: 1623 - protein, 3 aa, Artificial Sequence
  source: /note="Description of Artificial Sequence: Synthetic peptide"
DAS

SEQ ID NO: 1624 - protein, 3 aa, Artificial Sequence
  source: /note="Description of Artificial Sequence: Synthetic peptide"
GAS

SEQ ID NO: 1625 - protein, 3 aa, Artificial Sequence
  source: /note="Description of Artificial Sequence: Synthetic peptide"
GSS

SEQ ID NO: 1626 - protein, 3 aa, Artificial Sequence
  source: /note="Description of Artificial Sequence: Synthetic peptide"
AAS

SEQ ID NO: 1627 - protein, 3 aa, Artificial Sequence
  source: /note="Description of Artificial Sequence: Synthetic peptide"
GAS

SEQ ID NO: 1628 - protein, 3 aa, Artificial Sequence
  source: /note="Description of Artificial Sequence: Synthetic peptide"
GAS

SEQ ID NO: 1629 - protein, 3 aa, Artificial Sequence
  source: /note="Description of Artificial Sequence: Synthetic peptide"
GAS

SEQ ID NO: 1630 - protein, 3 aa, Artificial Sequence
  source: /note="Description of Artificial Sequence: Synthetic peptide"
GAS

SEQ ID NO: 1631 - protein, 3 aa, Artificial Sequence
  source: /note="Description of Artificial Sequence: Synthetic peptide"
GAS

SEQ ID NO: 1632 - protein, 3 aa, Artificial Sequence
  source: /note="Description of Artificial Sequence: Synthetic peptide"
LGS

SEQ ID NO: 1633 - protein, 3 aa, Artificial Sequence
  source: /note="Description of Artificial Sequence: Synthetic peptide"
GTS

SEQ ID NO: 1634 - protein, 3 aa, Artificial Sequence
  source: /note="Description of Artificial Sequence: Synthetic peptide"
GAS

SEQ ID NO: 1635 - protein, 3 aa, Artificial Sequence
  source: /note="Description of Artificial Sequence: Synthetic peptide"
SAS

SEQ ID NO: 1636 - protein, 3 aa, Artificial Sequence
  source: /note="Description of Artificial Sequence: Synthetic peptide"
LAS

SEQ ID NO: 1637 - protein, 3 aa, Artificial Sequence
  source: /note="Description of Artificial Sequence: Synthetic peptide"
LAS

SEQ ID NO: 1638 - protein, 3 aa, Artificial Sequence
  source: /note="Description of Artificial Sequence: Synthetic peptide"
LAS

SEQ ID NO: 1639 - protein, 6 aa, Artificial Sequence
  source: /note="Description of Artificial Sequence: Synthetic peptide"
SYSTPY

SEQ ID NO: 1640 - protein, 7 aa, Artificial Sequence
  source: /note="Description of Artificial Sequence: Synthetic peptide"
YHSSPSW

SEQ ID NO: 1641 - protein, 6 aa, Artificial Sequence
  source: /note="Description of Artificial Sequence: Synthetic peptide"
ALQTPY

SEQ ID NO: 1642 - protein, 5 aa, Artificial Sequence
  source: /note="Description of Artificial Sequence: Synthetic peptide"
NIQFP

SEQ ID NO: 1643 - protein, 6 aa, Artificial Sequence
  source: /note="Description of Artificial Sequence: Synthetic peptide"
ALQTPY

SEQ ID NO: 1644 - protein, 5 aa, Artificial Sequence
  source: /note="Description of Artificial Sequence: Synthetic peptide"
SYKRA

SEQ ID NO: 1645 - protein, 6 aa, Artificial Sequence
  source: /note="Description of Artificial Sequence: Synthetic peptide"
GRQFPY

SEQ ID NO: 1646 - protein, 5 aa, Artificial Sequence
  source: /note="Description of Artificial Sequence: Synthetic peptide"
YGSSL

SEQ ID NO: 1647 - protein, 6 aa, Artificial Sequence
  source: /note="Description of Artificial Sequence: Synthetic peptide"
YGSSSW

SEQ ID NO: 1648 - protein, 7 aa, Artificial Sequence
  source: /note="Description of Artificial Sequence: Synthetic peptide"
YGSSPPW

SEQ ID NO: 1649 - protein, 4 aa, Artificial Sequence
  source: /note="Description of Artificial Sequence: Synthetic peptide"
SYTL

SEQ ID NO: 1650 - protein, 6 aa, Artificial Sequence
  source: /note="Description of Artificial Sequence: Synthetic peptide"
GTHWPG

SEQ ID NO: 1651 - protein, 6 aa, Artificial Sequence
  source: /note="Description of Artificial Sequence: Synthetic peptide"
YESLPL

SEQ ID NO: 1652 - protein, 7 aa, Artificial Sequence
  source: /note="Description of Artificial Sequence: Synthetic peptide"
YNDWLPV

SEQ ID NO: 1653 - protein, 7 aa, Artificial Sequence
  source: /note="Description of Artificial Sequence: Synthetic peptide"
YAGSPPF

SEQ ID NO: 1654 - protein, 6 aa, Artificial Sequence
  source: /note="Description of Artificial Sequence: Synthetic peptide"
HDNFPL

SEQ ID NO: 1655 - protein, 6 aa, Artificial Sequence
  source: /note="Description of Artificial Sequence: Synthetic peptide"
YYRFPY

SEQ ID NO: 1656 - protein, 6 aa, Artificial Sequence
  source: /note="Description of Artificial Sequence: Synthetic peptide"
ALQTPY

SEQ ID NO: 1657 - protein, 8 aa, Artificial Sequence
  source: /note="Description of Artificial Sequence: Synthetic peptide"
WDSDSEHV

SEQ ID NO: 1658 - protein, 6 aa, Artificial Sequence
  source: /note="Description of Artificial Sequence: Synthetic peptide"
WDDTTV

SEQ ID NO: 1659 - protein, 6 aa, Artificial Sequence
  source: /note="Description of Artificial Sequence: Synthetic peptide"
YNSAPF

SEQ ID NO: 1660 - protein, 9 aa, Artificial Sequence
  source: /note="Description of Artificial Sequence: Synthetic peptide"
RDSSGDHLR

SEQ ID NO: 1661 - protein, 8 aa, Artificial Sequence
  source: /note="Description of Artificial Sequence: Synthetic peptide"
RDSSGHHL

SEQ ID NO: 1662 - protein, 11 aa, Artificial Sequence
  source: /note="Description of Artificial Sequence: Synthetic peptide"
YGSSFNGSSLF

SEQ ID NO: 1663 - protein, 7 aa, Artificial Sequence
  source: /note="Description of Artificial Sequence: Synthetic peptide"
FGTSSGL

SEQ ID NO: 1664 - protein, 7 aa, Artificial Sequence
  source: /note="Description of Artificial Sequence: Synthetic peptide"
YHSSPSW

SEQ ID NO: 1665 - protein, 7 aa, Artificial Sequence
  source: /note="Description of Artificial Sequence: Synthetic peptide"
YHSSPSW

SEQ ID NO: 1666 - protein, 6 aa, Artificial Sequence
  source: /note="Description of Artificial Sequence: Synthetic peptide"
SYSTPY

SEQ ID NO: 1667 - protein, 7 aa, Artificial Sequence
  source: /note="Description of Artificial Sequence: Synthetic peptide"
YESSPSW

SEQ ID NO: 1668 - protein, 7 aa, Artificial Sequence
  source: /note="Description of Artificial Sequence: Synthetic peptide"
YGSPPRF

SEQ ID NO: 1669 - protein, 7 aa, Artificial Sequence
  source: /note="Description of Artificial Sequence: Synthetic peptide"
YGSSPSW

SEQ ID NO: 1670 - protein, 7 aa, Artificial Sequence
  source: /note="Description of Artificial Sequence: Synthetic peptide"
YDSSPSW

SEQ ID NO: 1671 - protein, 7 aa, Artificial Sequence
  source: /note="Description of Artificial Sequence: Synthetic peptide"
YGTSPMY

SEQ ID NO: 1672 - protein, 6 aa, Artificial Sequence
  source: /note="Description of Artificial Sequence: Synthetic peptide"
ALQTPL

SEQ ID NO: 1673 - protein, 8 aa, Artificial Sequence
  source: /note="Description of Artificial Sequence: Synthetic peptide"
YGNSPPKF

SEQ ID NO: 1674 - protein, 7 aa, Artificial Sequence
  source: /note="Description of Artificial Sequence: Synthetic peptide"
YGGSPRL

SEQ ID NO: 1675 - protein, 6 aa, Artificial Sequence
  source: /note="Description of Artificial Sequence: Synthetic peptide"
HYSTPW

SEQ ID NO: 1676 - protein, 6 aa, Artificial Sequence
  source: /note="Description of Artificial Sequence: Synthetic peptide"
SRIFPR

SEQ ID NO: 1677 - protein, 6 aa, Artificial Sequence
  source: /note="Description of Artificial Sequence: Synthetic peptide"
SRTIPR

SEQ ID NO: 1678 - protein, 6 aa, Artificial Sequence
  source: /note="Description of Artificial Sequence: Synthetic peptide"
SRTIPR

SEQ ID NO: 1679 - protein, 10 aa, Artificial Sequence
  source: /note="Description of Artificial Sequence: Synthetic peptide"
GFALSNHGMS

SEQ ID NO: 1680 - protein, 10 aa, Artificial Sequence
  source: /note="Description of Artificial Sequence: Synthetic peptide"
GFTFSNYAMS

SEQ ID NO: 1681 - protein, 10 aa, Artificial Sequence
  source: /note="Description of Artificial Sequence: Synthetic peptide"
GFTFDDYAMH

SEQ ID NO: 1682 - protein, 10 aa, Artificial Sequence
  source: /note="Description of Artificial Sequence: Synthetic peptide"
GFALSNHGMS

SEQ ID NO: 1683 - protein, 10 aa, Artificial Sequence
  source: /note="Description of Artificial Sequence: Synthetic peptide"
GYIFDNFGIN

SEQ ID NO: 1684 - protein, 10 aa, Artificial Sequence
  source: /note="Description of Artificial Sequence: Synthetic peptide"
GFTFSSDAMT

SEQ ID NO: 1685 - protein, 10 aa, Artificial Sequence
  source: /note="Description of Artificial Sequence: Synthetic peptide"
GYTFSNYGIT

SEQ ID NO: 1686 - protein, 10 aa, Artificial Sequence
  source: /note="Description of Artificial Sequence: Synthetic peptide"
GFALSNHGMS

SEQ ID NO: 1687 - protein, 10 aa, Artificial Sequence
  source: /note="Description of Artificial Sequence: Synthetic peptide"
GFALSNHGMS

SEQ ID NO: 1688 - protein, 10 aa, Artificial Sequence
  source: /note="Description of Artificial Sequence: Synthetic peptide"
GFALSNHGMS

SEQ ID NO: 1689 - protein, 10 aa, Artificial Sequence
  source: /note="Description of Artificial Sequence: Synthetic peptide"
GFTFSDYYMS

SEQ ID NO: 1690 - protein, 10 aa, Artificial Sequence
  source: /note="Description of Artificial Sequence: Synthetic peptide"
GFTFSDYYMS

SEQ ID NO: 1691 - protein, 10 aa, Artificial Sequence
  source: /note="Description of Artificial Sequence: Synthetic peptide"
GFALSNHGMS

SEQ ID NO: 1692 - protein, 10 aa, Artificial Sequence
  source: /note="Description of Artificial Sequence: Synthetic peptide"
GFALSNHGMS

SEQ ID NO: 1693 - protein, 10 aa, Artificial Sequence
  source: /note="Description of Artificial Sequence: Synthetic peptide"
GFALSNHGMS

SEQ ID NO: 1694 - protein, 12 aa, Artificial Sequence
  source: /note="Description of Artificial Sequence: Synthetic peptide"
GGSISSSYYYWG

SEQ ID NO: 1695 - protein, 12 aa, Artificial Sequence
  source: /note="Description of Artificial Sequence: Synthetic peptide"
GFSLRTSGMCVS

SEQ ID NO: 1696 - protein, 10 aa, Artificial Sequence
  source: /note="Description of Artificial Sequence: Synthetic peptide"
GFTFSSYSMN

SEQ ID NO: 1697 - protein, 10 aa, Artificial Sequence
  source: /note="Description of Artificial Sequence: Synthetic peptide"
GFTFSDYYMS

SEQ ID NO: 1698 - protein, 10 aa, Artificial Sequence
  source: /note="Description of Artificial Sequence: Synthetic peptide"
GYTVTSHYIH

SEQ ID NO: 1699 - protein, 12 aa, Artificial Sequence
  source: /note="Description of Artificial Sequence: Synthetic peptide"
GGSISSGGYYWS

SEQ ID NO: 1700 - protein, 10 aa, Artificial Sequence
  source: /note="Description of Artificial Sequence: Synthetic peptide"
GGTFSSYAIS

SEQ ID NO: 1701 - protein, 12 aa, Artificial Sequence
  source: /note="Description of Artificial Sequence: Synthetic peptide"
GDSVSSNSAAWN

SEQ ID NO: 1702 - protein, 10 aa, Artificial Sequence
  source: /note="Description of Artificial Sequence: Synthetic peptide"
GFTFSSYAMS

SEQ ID NO: 1703 - protein, 10 aa, Artificial Sequence
  source: /note="Description of Artificial Sequence: Synthetic peptide"
GITFSRYPMS

SEQ ID NO: 1704 - protein, 10 aa, Artificial Sequence
  source: /note="Description of Artificial Sequence: Synthetic peptide"
GFTFSSYAMS

SEQ ID NO: 1705 - protein, 10 aa, Artificial Sequence
  source: /note="Description of Artificial Sequence: Synthetic peptide"
GFTFSSYAMS

SEQ ID NO: 1706 - protein, 10 aa, Artificial Sequence
  source: /note="Description of Artificial Sequence: Synthetic peptide"
GFTFDDYAMH

SEQ ID NO: 1707 - protein, 10 aa, Artificial Sequence
  source: /note="Description of Artificial Sequence: Synthetic peptide"
GFTFDDYAMH

SEQ ID NO: 1708 - protein, 10 aa, Artificial Sequence
  source: /note="Description of Artificial Sequence: Synthetic peptide"
GFTFSSYAMS

SEQ ID NO: 1709 - protein, 10 aa, Artificial Sequence
  source: /note="Description of Artificial Sequence: Synthetic peptide"
GFTFSSYAMS

SEQ ID NO: 1710 - protein, 10 aa, Artificial Sequence
  source: /note="Description of Artificial Sequence: Synthetic peptide"
GFTFSSYAMS

SEQ ID NO: 1711 - protein, 10 aa, Artificial Sequence
  source: /note="Description of Artificial Sequence: Synthetic peptide"
GFSFSSYAMS

SEQ ID NO: 1712 - protein, 10 aa, Artificial Sequence
  source: /note="Description of Artificial Sequence: Synthetic peptide"
GFTFSSYAMS

SEQ ID NO: 1713 - protein, 10 aa, Artificial Sequence
  source: /note="Description of Artificial Sequence: Synthetic peptide"
GFTFSSYAMS

SEQ ID NO: 1714 - protein, 10 aa, Artificial Sequence
  source: /note="Description of Artificial Sequence: Synthetic peptide"
GFTFSSYAMS

SEQ ID NO: 1715 - protein, 10 aa, Artificial Sequence
  source: /note="Description of Artificial Sequence: Synthetic peptide"
GYTFTNFGMN

SEQ ID NO: 1716 - protein, 10 aa, Artificial Sequence
  source: /note="Description of Artificial Sequence: Synthetic peptide"
GYTFTDYSIN

SEQ ID NO: 1717 - protein, 10 aa, Artificial Sequence
  source: /note="Description of Artificial Sequence: Synthetic peptide"
GYTFRHYSMN

SEQ ID NO: 1718 - protein, 10 aa, Artificial Sequence
  source: /note="Description of Artificial Sequence: Synthetic peptide"
GYTFTHYSMN

SEQ ID NO: 1719 - protein, 16 aa, Artificial Sequence
  source: /note="Description of Artificial Sequence: Synthetic peptide"
GIVYSGSTYYAASVKG

SEQ ID NO: 1720 - protein, 17 aa, Artificial Sequence
  source: /note="Description of Artificial Sequence: Synthetic peptide"
GISRSGENTYYADSVKG

SEQ ID NO: 1721 - protein, 17 aa, Artificial Sequence
  source: /note="Description of Artificial Sequence: Synthetic peptide"
GISWNSGSIGYADSVKG

SEQ ID NO: 1722 - protein, 16 aa, Artificial Sequence
  source: /note="Description of Artificial Sequence: Synthetic peptide"
GIVYSGSTYYAASVKG

SEQ ID NO: 1723 - protein, 17 aa, Artificial Sequence
  source: /note="Description of Artificial Sequence: Synthetic peptide"
WINPKNNNTNYAQKFQG

SEQ ID NO: 1724 - protein, 17 aa, Artificial Sequence
  source: /note="Description of Artificial Sequence: Synthetic peptide"
VISGSGGTTYYADSVKG

SEQ ID NO: 1725 - protein, 17 aa, Artificial Sequence
  source: /note="Description of Artificial Sequence: Synthetic peptide"
WISAYNGNTNYAQKFQG

SEQ ID NO: 1726 - protein, 16 aa, Artificial Sequence
  source: /note="Description of Artificial Sequence: Synthetic peptide"
GIVYSGSTYYAASVKG

SEQ ID NO: 1727 - protein, 16 aa, Artificial Sequence
  source: /note="Description of Artificial Sequence: Synthetic peptide"
GIVYSGSTYYAASVKG

SEQ ID NO: 1728 - protein, 16 aa, Artificial Sequence
  source: /note="Description of Artificial Sequence: Synthetic peptide"
GIVYSGSTYYAASVKG

SEQ ID NO: 1729 - protein, 17 aa, Artificial Sequence
  source: /note="Description of Artificial Sequence: Synthetic peptide"
YISSSGSTIYYADSVKG

SEQ ID NO: 1730 - protein, 17 aa, Artificial Sequence
  source: /note="Description of Artificial Sequence: Synthetic peptide"
YISSSGNTIYYADSVKG

SEQ ID NO: 1731 - protein, 16 aa, Artificial Sequence
  source: /note="Description of Artificial Sequence: Synthetic peptide"
GIVYSGSTYYAASVKG

SEQ ID NO: 1732 - protein, 16 aa, Artificial Sequence
  source: /note="Description of Artificial Sequence: Synthetic peptide"
GIVYSGSTYYAASVKG

SEQ ID NO: 1733 - protein, 16 aa, Artificial Sequence
  source: /note="Description of Artificial Sequence: Synthetic peptide"
GIVYSGSTYYAASVKG

SEQ ID NO: 1734 - protein, 16 aa, Artificial Sequence
  source: /note="Description of Artificial Sequence: Synthetic peptide"
SIYYSGSAYYNPSLKS

SEQ ID NO: 1735 - protein, 16 aa, Artificial Sequence
  source: /note="Description of Artificial Sequence: Synthetic peptide"
RIDWDEDKFYSTSLKT

SEQ ID NO: 1736 - protein, 17 aa, Artificial Sequence
  source: /note="Description of Artificial Sequence: Synthetic peptide"
SISSSSSYIYYADSVKG

SEQ ID NO: 1737 - protein, 17 aa, Artificial Sequence
  source: /note="Description of Artificial Sequence: Synthetic peptide"
YISSSGSTIYYADSVKG

SEQ ID NO: 1738 - protein, 17 aa, Artificial Sequence
  source: /note="Description of Artificial Sequence: Synthetic peptide"
MINPSGGVTAYSQTLQG

SEQ ID NO: 1739 - protein, 16 aa, Artificial Sequence
  source: /note="Description of Artificial Sequence: Synthetic peptide"
YIYYSGSTYYNPSLKS

SEQ ID NO: 1740 - protein, 17 aa, Artificial Sequence
  source: /note="Description of Artificial Sequence: Synthetic peptide"
GIIPIFGTANYAQKFQG

SEQ ID NO: 1741 - protein, 18 aa, Artificial Sequence
  source: /note="Description of Artificial Sequence: Synthetic peptide"
RTYYRSKWYSFYAISLKS

SEQ ID NO: 1742 - protein, 17 aa, Artificial Sequence
  source: /note="Description of Artificial Sequence: Synthetic peptide"
AISGSGGSTYYADSVKG

SEQ ID NO: 1743 - protein, 17 aa, Artificial Sequence
  source: /note="Description of Artificial Sequence: Synthetic peptide"
GISDSGVSTYYADSAKG

SEQ ID NO: 1744 - protein, 17 aa, Artificial Sequence
  source: /note="Description of Artificial Sequence: Synthetic peptide"
AISGSGGSTYYADSVKG

SEQ ID NO: 1745 - protein, 17 aa, Artificial Sequence
  source: /note="Description of Artificial Sequence: Synthetic peptide"
AISGSGGSTYYADSVKG

SEQ ID NO: 1746 - protein, 17 aa, Artificial Sequence
  source: /note="Description of Artificial Sequence: Synthetic peptide"
GISWNSGSIGYADSVKG

SEQ ID NO: 1747 - protein, 17 aa, Artificial Sequence
  source: /note="Description of Artificial Sequence: Synthetic peptide"
SINWKGNSLAYGDSVKG

SEQ ID NO: 1748 - protein, 17 aa, Artificial Sequence
  source: /note="Description of Artificial Sequence: Synthetic peptide"
AISGSGGSTYYADSVKG

SEQ ID NO: 1749 - protein, 17 aa, Artificial Sequence
  source: /note="Description of Artificial Sequence: Synthetic peptide"
AISGSGGSTYYADSVKG

SEQ ID NO: 1750 - protein, 17 aa, Artificial Sequence
  source: /note="Description of Artificial Sequence: Synthetic peptide"
AISGSGGSTYYADSVKG

SEQ ID NO: 1751 - protein, 17 aa, Artificial Sequence
  source: /note="Description of Artificial Sequence: Synthetic peptide"
AISGSGGSTYYADSVKG

SEQ ID NO: 1752 - protein, 17 aa, Artificial Sequence
  source: /note="Description of Artificial Sequence: Synthetic peptide"
AISGSGGSTYYADSVKG

SEQ ID NO: 1753 - protein, 17 aa, Artificial Sequence
  source: /note="Description of Artificial Sequence: Synthetic peptide"
AISGSGGSTYYADSVKG

SEQ ID NO: 1754 - protein, 17 aa, Artificial Sequence
  source: /note="Description of Artificial Sequence: Synthetic peptide"
AISGSGGSTYYADSVKG

SEQ ID NO: 1755 - protein, 17 aa, Artificial Sequence
  source: /note="Description of Artificial Sequence: Synthetic peptide"
WINTYTGESYFADDFKG

SEQ ID NO: 1756 - protein, 17 aa, Artificial Sequence
  source: /note="Description of Artificial Sequence: Synthetic peptide"
WINTETREPAYAYDFRG

SEQ ID NO: 1757 - protein, 17 aa, Artificial Sequence
  source: /note="Description of Artificial Sequence: Synthetic peptide"
RINTESGVPIYADDFKG

SEQ ID NO: 1758 - protein, 17 aa, Artificial Sequence
  source: /note="Description of Artificial Sequence: Synthetic peptide"
RINTETGEPLYADDFKG

SEQ ID NO: 1759 - protein, 7 aa, Artificial Sequence
  source: /note="Description of Artificial Sequence: Synthetic peptide"
HGGESDV

SEQ ID NO: 1760 - protein, 11 aa, Artificial Sequence
  source: /note="Description of Artificial Sequence: Synthetic peptide"
SPAHYYGGMDV

SEQ ID NO: 1761 - protein, 6 aa, Artificial Sequence
  source: /note="Description of Artificial Sequence: Synthetic peptide"
HSFLAY

SEQ ID NO: 1762 - protein, 7 aa, Artificial Sequence
  source: /note="Description of Artificial Sequence: Synthetic peptide"
HGGESDV

SEQ ID NO: 1763 - protein, 11 aa, Artificial Sequence
  source: /note="Description of Artificial Sequence: Synthetic peptide"
GPYYYQSYMDV

SEQ ID NO: 1764 - protein, 14 aa, Artificial Sequence
  source: /note="Description of Artificial Sequence: Synthetic peptide"
LDSSGYYYARGPRY

SEQ ID NO: 1765 - protein, 9 aa, Artificial Sequence
  source: /note="Description of Artificial Sequence: Synthetic peptide"
GPYYYYMDV

SEQ ID NO: 1766 - protein, 7 aa, Artificial Sequence
  source: /note="Description of Artificial Sequence: Synthetic peptide"
HGGESDV

SEQ ID NO: 1767 - protein, 7 aa, Artificial Sequence
  source: /note="Description of Artificial Sequence: Synthetic peptide"
HGGESDV

SEQ ID NO: 1768 - protein, 7 aa, Artificial Sequence
  source: /note="Description of Artificial Sequence: Synthetic peptide"
HGGESDV

SEQ ID NO: 1769 - protein, 8 aa, Artificial Sequence
  source: /note="Description of Artificial Sequence: Synthetic peptide"
ESGDGMDV

SEQ ID NO: 1770 - protein, 8 aa, Artificial Sequence
  source: /note="Description of Artificial Sequence: Synthetic peptide"
STMVREDY

SEQ ID NO: 1771 - protein, 7 aa, Artificial Sequence
  source: /note="Description of Artificial Sequence: Synthetic peptide"
HGGESDV

SEQ ID NO: 1772 - protein, 7 aa, Artificial Sequence
  source: /note="Description of Artificial Sequence: Synthetic peptide"
HGGESDV

SEQ ID NO: 1773 - protein, 7 aa, Artificial Sequence
  source: /note="Description of Artificial Sequence: Synthetic peptide"
HGGESDV

SEQ ID NO: 1774 - protein, 11 aa, Artificial Sequence
  source: /note="Description of Artificial Sequence: Synthetic peptide"
HWQEWPDAFDI

SEQ ID NO: 1775 - protein, 13 aa, Artificial Sequence
  source: /note="Description of Artificial Sequence: Synthetic peptide"
SGAGGTSATAFDI

SEQ ID NO: 1776 - protein, 10 aa, Artificial Sequence
  source: /note="Description of Artificial Sequence: Synthetic peptide"
TIAAVYAFDI

SEQ ID NO: 1777 - protein, 8 aa, Artificial Sequence
  source: /note="Description of Artificial Sequence: Synthetic peptide"
DLRGAFDI

SEQ ID NO: 1778 - protein, 11 aa, Artificial Sequence
  source: /note="Description of Artificial Sequence: Synthetic peptide"
EGSGSGWYFDF

SEQ ID NO: 1779 - protein, 13 aa, Artificial Sequence
  source: /note="Description of Artificial Sequence: Synthetic peptide"
AGIAARLRGAFDI

SEQ ID NO: 1780 - protein, 20 aa, Artificial Sequence
  source: /note="Description of Artificial Sequence: Synthetic peptide"
RGGYQLLRWDVGLLRSAFDI

SEQ ID NO: 1781 - protein, 13 aa, Artificial Sequence
  source: /note="Description of Artificial Sequence: Synthetic peptide"
SSPEGLFLYWFDP

SEQ ID NO: 1782 - protein, 9 aa, Artificial Sequence
  source: /note="Description of Artificial Sequence: Synthetic peptide"
VEGSGSLDY

SEQ ID NO: 1783 - protein, 9 aa, Artificial Sequence
  source: /note="Description of Artificial Sequence: Synthetic peptide"
RAGSEASDI

SEQ ID NO: 1784 - protein, 15 aa, Artificial Sequence
  source: /note="Description of Artificial Sequence: Synthetic peptide"
ATYKRELRYYYGMDV

SEQ ID NO: 1785 - protein, 15 aa, Artificial Sequence
  source: /note="Description of Artificial Sequence: Synthetic peptide"
ATYKRELRYYYGMDV

SEQ ID NO: 1786 - protein, 8 aa, Artificial Sequence
  source: /note="Description of Artificial Sequence: Synthetic peptide"
VGKAVPDV

SEQ ID NO: 1787 - protein, 13 aa, Artificial Sequence
  source: /note="Description of Artificial Sequence: Synthetic peptide"
HQGVAYYNYAMDV

SEQ ID NO: 1788 - protein, 8 aa, Artificial Sequence
  source: /note="Description of Artificial Sequence: Synthetic peptide"
VVRDGMDV

SEQ ID NO: 1789 - protein, 9 aa, Artificial Sequence
  source: /note="Description of Artificial Sequence: Synthetic peptide"
IPQTGTFDY

SEQ ID NO: 1790 - protein, 15 aa, Artificial Sequence
  source: /note="Description of Artificial Sequence: Synthetic peptide"
ANYKRELRYYYGMDV

SEQ ID NO: 1791 - protein, 11 aa, Artificial Sequence
  source: /note="Description of Artificial Sequence: Synthetic peptide"
ALVGATGAFDI

SEQ ID NO: 1792 - protein, 8 aa, Artificial Sequence
  source: /note="Description of Artificial Sequence: Synthetic peptide"
WFGEGFDP

SEQ ID NO: 1793 - protein, 17 aa, Artificial Sequence
  source: /note="Description of Artificial Sequence: Synthetic peptide"
VGYDSSGYYRDYYGMDV

SEQ ID NO: 1794 - protein, 13 aa, Artificial Sequence
  source: /note="Description of Artificial Sequence: Synthetic peptide"
MGWSSGYLGAFDI

SEQ ID NO: 1795 - protein, 13 aa, Artificial Sequence
  source: /note="Description of Artificial Sequence: Synthetic peptide"
GEIYYGYDGGFAY

SEQ ID NO: 1796 - protein, 8 aa, Artificial Sequence
  source: /note="Description of Artificial Sequence: Synthetic peptide"
DYSYAMDY

SEQ ID NO: 1797 - protein, 8 aa, Artificial Sequence
  source: /note="Description of Artificial Sequence: Synthetic peptide"
DYLYSLDF

SEQ ID NO: 1798 - protein, 8 aa, Artificial Sequence
  source: /note="Description of Artificial Sequence: Synthetic peptide"
DYLYSCDY

SEQ ID NO: 1799 - protein, 11 aa, Artificial Sequence
  source: /note="Description of Artificial Sequence: Synthetic peptide"
RASQSISSYLN

SEQ ID NO: 1800 - protein, 12 aa, Artificial Sequence
  source: /note="Description of Artificial Sequence: Synthetic peptide"
RASQSISSSFLA

SEQ ID NO: 1801 - protein, 16 aa, Artificial Sequence
  source: /note="Description of Artificial Sequence: Synthetic peptide"
RSSQSLLHSNGYNYLD

SEQ ID NO: 1802 - protein, 16 aa, Artificial Sequence
  source: /note="Description of Artificial Sequence: Synthetic peptide"
KSSQSLLRNDGKTPLY

SEQ ID NO: 1803 - protein, 16 aa, Artificial Sequence
  source: /note="Description of Artificial Sequence: Synthetic peptide"
RSSQSLLHSNGYNYLN

SEQ ID NO: 1804 - protein, 11 aa, Artificial Sequence
  source: /note="Description of Artificial Sequence: Synthetic peptide"
RASQSISSYLN

SEQ ID NO: 1805 - protein, 16 aa, Artificial Sequence
  source: /note="Description of Artificial Sequence: Synthetic peptide"
RSSQSLLYSNGYNYVD

SEQ ID NO: 1806 - protein, 11 aa, Artificial Sequence
  source: /note="Description of Artificial Sequence: Synthetic peptide"
RASQSVSSNLA

SEQ ID NO: 1807 - protein, 11 aa, Artificial Sequence
  source: /note="Description of Artificial Sequence: Synthetic peptide"
RASQSVSSKLA

SEQ ID NO: 1808 - protein, 12 aa, Artificial Sequence
  source: /note="Description of Artificial Sequence: Synthetic peptide"
RASQSVGSTNLA

SEQ ID NO: 1809 - protein, 11 aa, Artificial Sequence
  source: /note="Description of Artificial Sequence: Synthetic peptide"
RASQSISSYLN

SEQ ID NO: 1810 - protein, 16 aa, Artificial Sequence
  source: /note="Description of Artificial Sequence: Synthetic peptide"
KSSESLVHNSGKTYLN

SEQ ID NO: 1811 - protein, 11 aa, Artificial Sequence
  source: /note="Description of Artificial Sequence: Synthetic peptide"
QASEDINKFLN

SEQ ID NO: 1812 - protein, 11 aa, Artificial Sequence
  source: /note="Description of Artificial Sequence: Synthetic peptide"
RASQSVGSNLA

SEQ ID NO: 1813 - protein, 12 aa, Artificial Sequence
  source: /note="Description of Artificial Sequence: Synthetic peptide"
RASQSIGSSSLA

SEQ ID NO: 1814 - protein, 11 aa, Artificial Sequence
  source: /note="Description of Artificial Sequence: Synthetic peptide"
KASQDIDDAMN

SEQ ID NO: 1815 - protein, 11 aa, Artificial Sequence
  source: /note="Description of Artificial Sequence: Synthetic peptide"
RASQDIYNNLA

SEQ ID NO: 1816 - protein, 16 aa, Artificial Sequence
  source: /note="Description of Artificial Sequence: Synthetic peptide"
RSSQSLLHSNGYNYLD

SEQ ID NO: 1817 - protein, 11 aa, Artificial Sequence
  source: /note="Description of Artificial Sequence: Synthetic peptide"
GGNNIGTKSVH

SEQ ID NO: 1818 - protein, 11 aa, Artificial Sequence
  source: /note="Description of Artificial Sequence: Synthetic peptide"
SGDGLSKKYVS

SEQ ID NO: 1819 - protein, 11 aa, Artificial Sequence
  source: /note="Description of Artificial Sequence: Synthetic peptide"
RASQGIRNWLA

SEQ ID NO: 1820 - protein, 11 aa, Artificial Sequence
  source: /note="Description of Artificial Sequence: Synthetic peptide"
GGNNIGSKSVH

SEQ ID NO: 1821 - protein, 11 aa, Artificial Sequence
  source: /note="Description of Artificial Sequence: Synthetic peptide"
QGDSLGNYYAT

SEQ ID NO: 1822 - protein, 12 aa, Artificial Sequence
  source: /note="Description of Artificial Sequence: Synthetic peptide"
RASQSVSSAYLA

SEQ ID NO: 1823 - protein, 11 aa, Artificial Sequence
  source: /note="Description of Artificial Sequence: Synthetic peptide"
RASQSVSNSLA

SEQ ID NO: 1824 - protein, 12 aa, Artificial Sequence
  source: /note="Description of Artificial Sequence: Synthetic peptide"
RASQSVSSSFLA

SEQ ID NO: 1825 - protein, 12 aa, Artificial Sequence
  source: /note="Description of Artificial Sequence: Synthetic peptide"
RASQSVSTTFLA

SEQ ID NO: 1826 - protein, 11 aa, Artificial Sequence
  source: /note="Description of Artificial Sequence: Synthetic peptide"
RASQSISSYLN

SEQ ID NO: 1827 - protein, 12 aa, Artificial Sequence
  source: /note="Description of Artificial Sequence: Synthetic peptide"
RATQSIGSSFLA

SEQ ID NO: 1828 - protein, 12 aa, Artificial Sequence
  source: /note="Description of Artificial Sequence: Synthetic peptide"
RASQSVSSSYLA

SEQ ID NO: 1829 - protein, 12 aa, Artificial Sequence
  source: /note="Description of Artificial Sequence: Synthetic peptide"
RASQSVSSSYLA

SEQ ID NO: 1830 - protein, 12 aa, Artificial Sequence
  source: /note="Description of Artificial Sequence: Synthetic peptide"
RASQRVASNYLA

SEQ ID NO: 1831 - protein, 12 aa, Artificial Sequence
  source: /note="Description of Artificial Sequence: Synthetic peptide"
RASQSLSSNFLA

SEQ ID NO: 1832 - protein, 16 aa, Artificial Sequence
  source: /note="Description of Artificial Sequence: Synthetic peptide"
RSSQSLLHSNGYNYLD

SEQ ID NO: 1833 - protein, 12 aa, Artificial Sequence
  source: /note="Description of Artificial Sequence: Synthetic peptide"
RASQSVSSSYLA

SEQ ID NO: 1834 - protein, 12 aa, Artificial Sequence
  source: /note="Description of Artificial Sequence: Synthetic peptide"
RASQSVASSFLA

SEQ ID NO: 1835 - protein, 11 aa, Artificial Sequence
  source: /note="Description of Artificial Sequence: Synthetic peptide"
RASQDVNTAVS

SEQ ID NO: 1836 - protein, 15 aa, Artificial Sequence
  source: /note="Description of Artificial Sequence: Synthetic peptide"
RASESVSVIGAHLIH

SEQ ID NO: 1837 - protein, 15 aa, Artificial Sequence
  source: /note="Description of Artificial Sequence: Synthetic peptide"
RASESVTILGSHLIY

SEQ ID NO: 1838 - protein, 15 aa, Artificial Sequence
  source: /note="Description of Artificial Sequence: Synthetic peptide"
RASESVTILGSHLIY

SEQ ID NO: 1839 - protein, 7 aa, Artificial Sequence
  source: /note="Description of Artificial Sequence: Synthetic peptide"
AASSLQS

SEQ ID NO: 1840 - protein, 7 aa, Artificial Sequence
  source: /note="Description of Artificial Sequence: Synthetic peptide"
GASRRAT

SEQ ID NO: 1841 - protein, 7 aa, Artificial Sequence
  source: /note="Description of Artificial Sequence: Synthetic peptide"
LGSNRAS

SEQ ID NO: 1842 - protein, 7 aa, Artificial Sequence
  source: /note="Description of Artificial Sequence: Synthetic peptide"
EVSNRFS

SEQ ID NO: 1843 - protein, 7 aa, Artificial Sequence
  source: /note="Description of Artificial Sequence: Synthetic peptide"
LGSKRAS

SEQ ID NO: 1844 - protein, 7 aa, Artificial Sequence
  source: /note="Description of Artificial Sequence: Synthetic peptide"
GASTLAS

SEQ ID NO: 1845 - protein, 7 aa, Artificial Sequence
  source: /note="Description of Artificial Sequence: Synthetic peptide"
LGSNRAS

SEQ ID NO: 1846 - protein, 7 aa, Artificial Sequence
  source: /note="Description of Artificial Sequence: Synthetic peptide"
GASTRAS

SEQ ID NO: 1847 - protein, 7 aa, Artificial Sequence
  source: /note="Description of Artificial Sequence: Synthetic peptide"
GASIRAT

SEQ ID NO: 1848 - protein, 7 aa, Artificial Sequence
  source: /note="Description of Artificial Sequence: Synthetic peptide"
DASNRAT

SEQ ID NO: 1849 - protein, 7 aa, Artificial Sequence
  source: /note="Description of Artificial Sequence: Synthetic peptide"
AASSLQS

SEQ ID NO: 1850 - protein, 7 aa, Artificial Sequence
  source: /note="Description of Artificial Sequence: Synthetic peptide"
EVSNRDS

SEQ ID NO: 1851 - protein, 7 aa, Artificial Sequence
  source: /note="Description of Artificial Sequence: Synthetic peptide"
DASTLQT

SEQ ID NO: 1852 - protein, 7 aa, Artificial Sequence
  source: /note="Description of Artificial Sequence: Synthetic peptide"
GASTRAT

SEQ ID NO: 1853 - protein, 7 aa, Artificial Sequence
  source: /note="Description of Artificial Sequence: Synthetic peptide"
GASSRAS

SEQ ID NO: 1854 - protein, 7 aa, Artificial Sequence
  source: /note="Description of Artificial Sequence: Synthetic peptide"
SATSPVP

SEQ ID NO: 1855 - protein, 7 aa, Artificial Sequence
  source: /note="Description of Artificial Sequence: Synthetic peptide"
AANKSQS

SEQ ID NO: 1856 - protein, 7 aa, Artificial Sequence
  source: /note="Description of Artificial Sequence: Synthetic peptide"
LGSNRAS

SEQ ID NO: 1857 - protein, 7 aa, Artificial Sequence
  source: /note="Description of Artificial Sequence: Synthetic peptide"
DDSVRPS

SEQ ID NO: 1858 - protein, 7 aa, Artificial Sequence
  source: /note="Description of Artificial Sequence: Synthetic peptide"
RDKERPS

SEQ ID NO: 1859 - protein, 7 aa, Artificial Sequence
  source: /note="Description of Artificial Sequence: Synthetic peptide"
AASNLQS

SEQ ID NO: 1860 - protein, 7 aa, Artificial Sequence
  source: /note="Description of Artificial Sequence: Synthetic peptide"
GKNNRPS

SEQ ID NO: 1861 - protein, 7 aa, Artificial Sequence
  source: /note="Description of Artificial Sequence: Synthetic peptide"
GTNNRPS

SEQ ID NO: 1862 - protein, 7 aa, Artificial Sequence
  source: /note="Description of Artificial Sequence: Synthetic peptide"
GASTRAT

SEQ ID NO: 1863 - protein, 7 aa, Artificial Sequence
  source: /note="Description of Artificial Sequence: Synthetic peptide"
DASSRAT

SEQ ID NO: 1864 - protein, 7 aa, Artificial Sequence
  source: /note="Description of Artificial Sequence: Synthetic peptide"
GASSRAT

SEQ ID NO: 1865 - protein, 7 aa, Artificial Sequence
  source: /note="Description of Artificial Sequence: Synthetic peptide"
GSSNRAT

SEQ ID NO: 1866 - protein, 7 aa, Artificial Sequence
  source: /note="Description of Artificial Sequence: Synthetic peptide"
AASSLQS

SEQ ID NO: 1867 - protein, 7 aa, Artificial Sequence
  source: /note="Description of Artificial Sequence: Synthetic peptide"
GASQRAT

SEQ ID NO: 1868 - protein, 7 aa, Artificial Sequence
  source: /note="Description of Artificial Sequence: Synthetic peptide"
GASSRAT

SEQ ID NO: 1869 - protein, 7 aa, Artificial Sequence
  source: /note="Description of Artificial Sequence: Synthetic peptide"
GASSRAT

SEQ ID NO: 1870 - protein, 7 aa, Artificial Sequence
  source: /note="Description of Artificial Sequence: Synthetic peptide"
GASSRAT

SEQ ID NO: 1871 - protein, 7 aa, Artificial Sequence
  source: /note="Description of Artificial Sequence: Synthetic peptide"
GASNWAT

SEQ ID NO: 1872 - protein, 7 aa, Artificial Sequence
  source: /note="Description of Artificial Sequence: Synthetic peptide"
LGSNRAS

SEQ ID NO: 1873 - protein, 7 aa, Artificial Sequence
  source: /note="Description of Artificial Sequence: Synthetic peptide"
GTSSRAT

SEQ ID NO: 1874 - protein, 7 aa, Artificial Sequence
  source: /note="Description of Artificial Sequence: Synthetic peptide"
GASGRAT

SEQ ID NO: 1875 - protein, 7 aa, Artificial Sequence
  source: /note="Description of Artificial Sequence: Synthetic peptide"
SASYRYT

SEQ ID NO: 1876 - protein, 7 aa, Artificial Sequence
  source: /note="Description of Artificial Sequence: Synthetic peptide"
LASNLET

SEQ ID NO: 1877 - protein, 7 aa, Artificial Sequence
  source: /note="Description of Artificial Sequence: Synthetic peptide"
LASNVQT

SEQ ID NO: 1878 - protein, 7 aa, Artificial Sequence
  source: /note="Description of Artificial Sequence: Synthetic peptide"
LASNVQT

SEQ ID NO: 1879 - protein, 9 aa, Artificial Sequence
  source: /note="Description of Artificial Sequence: Synthetic peptide"
QQSYSTPYT

SEQ ID NO: 1880 - protein, 10 aa, Artificial Sequence
  source: /note="Description of Artificial Sequence: Synthetic peptide"
QQYHSSPSWT

SEQ ID NO: 1881 - protein, 9 aa, Artificial Sequence
  source: /note="Description of Artificial Sequence: Synthetic peptide"
MQALQTPYT

SEQ ID NO: 1882 - protein, 8 aa, Artificial Sequence
  source: /note="Description of Artificial Sequence: Synthetic peptide"
MQNIQFPS

SEQ ID NO: 1883 - protein, 9 aa, Artificial Sequence
  source: /note="Description of Artificial Sequence: Synthetic peptide"
MQALQTPYT

SEQ ID NO: 1884 - protein, 8 aa, Artificial Sequence
  source: /note="Description of Artificial Sequence: Synthetic peptide"
QQSYKRAS

SEQ ID NO: 1885 - protein, 9 aa, Artificial Sequence
  source: /note="Description of Artificial Sequence: Synthetic peptide"
MQGRQFPYS

SEQ ID NO: 1886 - protein, 8 aa, Artificial Sequence
  source: /note="Description of Artificial Sequence: Synthetic peptide"
QQYGSSLT

SEQ ID NO: 1887 - protein, 9 aa, Artificial Sequence
  source: /note="Description of Artificial Sequence: Synthetic peptide"
QQYGSSSWT

SEQ ID NO: 1888 - protein, 10 aa, Artificial Sequence
  source: /note="Description of Artificial Sequence: Synthetic peptide"
QQYGSSPPWT

SEQ ID NO: 1889 - protein, 7 aa, Artificial Sequence
  source: /note="Description of Artificial Sequence: Synthetic peptide"
QQSYTLA

SEQ ID NO: 1890 - protein, 9 aa, Artificial Sequence
  source: /note="Description of Artificial Sequence: Synthetic peptide"
MQGTHWPGT

SEQ ID NO: 1891 - protein, 9 aa, Artificial Sequence
  source: /note="Description of Artificial Sequence: Synthetic peptide"
QQYESLPLT

SEQ ID NO: 1892 - protein, 10 aa, Artificial Sequence
  source: /note="Description of Artificial Sequence: Synthetic peptide"
QQYNDWLPVT

SEQ ID NO: 1893 - protein, 10 aa, Artificial Sequence
  source: /note="Description of Artificial Sequence: Synthetic peptide"
QQYAGSPPFT

SEQ ID NO: 1894 - protein, 9 aa, Artificial Sequence
  source: /note="Description of Artificial Sequence: Synthetic peptide"
LQHDNFPLT

SEQ ID NO: 1895 - protein, 9 aa, Artificial Sequence
  source: /note="Description of Artificial Sequence: Synthetic peptide"
QHYYRFPYS

SEQ ID NO: 1896 - protein, 9 aa, Artificial Sequence
  source: /note="Description of Artificial Sequence: Synthetic peptide"
MQALQTPYT

SEQ ID NO: 1897 - protein, 11 aa, Artificial Sequence
  source: /note="Description of Artificial Sequence: Synthetic peptide"
QVWDSDSEHVV

SEQ ID NO: 1898 - protein, 9 aa, Artificial Sequence
  source: /note="Description of Artificial Sequence: Synthetic peptide"
QAWDDTTVV

SEQ ID NO: 1899 - protein, 9 aa, Artificial Sequence
  source: /note="Description of Artificial Sequence: Synthetic peptide"
QKYNSAPFT

SEQ ID NO: 1900 - protein, 12 aa, Artificial Sequence
  source: /note="Description of Artificial Sequence: Synthetic peptide"
SSRDSSGDHLRV

SEQ ID NO: 1901 - protein, 11 aa, Artificial Sequence
  source: /note="Description of Artificial Sequence: Synthetic peptide"
NSRDSSGHHLL

SEQ ID NO: 1902 - protein, 14 aa, Artificial Sequence
  source: /note="Description of Artificial Sequence: Synthetic peptide"
QHYGSSFNGSSLFT

SEQ ID NO: 1903 - protein, 10 aa, Artificial Sequence
  source: /note="Description of Artificial Sequence: Synthetic peptide"
QQFGTSSGLT

SEQ ID NO: 1904 - protein, 10 aa, Artificial Sequence
  source: /note="Description of Artificial Sequence: Synthetic peptide"
QQYHSSPSWT

SEQ ID NO: 1905 - protein, 10 aa, Artificial Sequence
  source: /note="Description of Artificial Sequence: Synthetic peptide"
QQYHSSPSWT

SEQ ID NO: 1906 - protein, 9 aa, Artificial Sequence
  source: /note="Description of Artificial Sequence: Synthetic peptide"
QQSYSTPYS

SEQ ID NO: 1907 - protein, 10 aa, Artificial Sequence
  source: /note="Description of Artificial Sequence: Synthetic peptide"
QHYESSPSWT

SEQ ID NO: 1908 - protein, 10 aa, Artificial Sequence
  source: /note="Description of Artificial Sequence: Synthetic peptide"
QQYGSPPRFT

SEQ ID NO: 1909 - protein, 10 aa, Artificial Sequence
  source: /note="Description of Artificial Sequence: Synthetic peptide"
QHYGSSPSWT

SEQ ID NO: 1910 - protein, 10 aa, Artificial Sequence
  source: /note="Description of Artificial Sequence: Synthetic peptide"
QHYDSSPSWT

SEQ ID NO: 1911 - protein, 10 aa, Artificial Sequence
  source: /note="Description of Artificial Sequence: Synthetic peptide"
QYYGTSPMYT

SEQ ID NO: 1912 - protein, 9 aa, Artificial Sequence
  source: /note="Description of Artificial Sequence: Synthetic peptide"
MQALQTPLT

SEQ ID NO: 1913 - protein, 11 aa, Artificial Sequence
  source: /note="Description of Artificial Sequence: Synthetic peptide"
QHYGNSPPKFT

SEQ ID NO: 1914 - protein, 10 aa, Artificial Sequence
  source: /note="Description of Artificial Sequence: Synthetic peptide"
QHYGGSPRLT

SEQ ID NO: 1915 - protein, 9 aa, Artificial Sequence
  source: /note="Description of Artificial Sequence: Synthetic peptide"
QQHYSTPWT

SEQ ID NO: 1916 - protein, 9 aa, Artificial Sequence
  source: /note="Description of Artificial Sequence: Synthetic peptide"
LQSRIFPRT

SEQ ID NO: 1917 - protein, 9 aa, Artificial Sequence
  source: /note="Description of Artificial Sequence: Synthetic peptide"
LQSRTIPRT

SEQ ID NO: 1918 - protein, 9 aa, Artificial Sequence
  source: /note="Description of Artificial Sequence: Synthetic peptide"
LQSRTIPRT

SEQ ID NO: 1919 - protein, 21 aa, Artificial Sequence
  source: /note="Description of Artificial Sequence: Synthetic peptide"
MALPVTALLLPLALLLHAARP

SEQ ID NO: 1920 - DNA, 63 bp, Artificial Sequence; identical to SEQ ID NO: 402
  source: /note="Description of Artificial Sequence: Synthetic oligonucleotide"

SEQ ID NO: 1921 - protein, 45 aa, Artificial Sequence; identical to SEQ ID NO: 403
  source: /note="Description of Artificial Sequence: Synthetic polypeptide"

SEQ ID NO: 1922 - DNA, 135 bp, Artificial Sequence; identical to SEQ ID NO: 404
  source: /note="Description of Artificial Sequence: Synthetic polynucleotide"

SEQ ID NO: 1923 - protein, 24 aa, Artificial Sequence
  source: /note="Description of Artificial Sequence: Synthetic peptide"
IYIWAPLAGTCGVLLLSLVITLYC

SEQ ID NO: 1924 - DNA, 72 bp, Artificial Sequence; identical to SEQ ID NO: 13
  source: /note="Description of Artificial Sequence: Synthetic oligonucleotide"

SEQ ID NO: 1925 - protein, 42 aa, Artificial Sequence; identical to SEQ ID NO: 14
  source: /note="Description of Artificial Sequence: Synthetic polypeptide"

SEQ ID NO: 1926 - DNA, 126 bp, Artificial Sequence; identical to SEQ ID NO: 15
  source: /note="Description of Artificial Sequence: Synthetic polynucleotide"

SEQ ID NO: 1927 - protein, 41 aa, Artificial Sequence
  source: /note="Description of Artificial Sequence: Synthetic polypeptide"
RSKRSRLLHSDYMNMTPRRPGPTRKHYQPYAPPRDFAAYRS

SEQ ID NO: 1928 - DNA, 123 bp, Artificial Sequence; identical to SEQ ID NO: 17
  source: /note="Description of Artificial Sequence: Synthetic polynucleotide"

SEQ ID NO: 1929 - protein, 35 aa, Artificial Sequence
  source: /note="Description of Artificial Sequence: Synthetic polypeptide"
TKKKYSSSVHDPNGEYMFMRAVNTAKKSRLTDVTL

SEQ ID NO: 1930 - DNA, 105 bp, Artificial Sequence
  source: /note="Description of Artificial Sequence: Synthetic polynucleotide"
acaaaaaagaagtattcatccagtgtgcacgaccctaacggtgaatacatgttcatgagagcagtgaacacagccaaaaaatccagactcacagatgtgacccta

SEQ ID NO: 1931 - protein, 112 aa, Artificial Sequence; identical to SEQ ID NO: 18
  source: /note="Description of Artificial Sequence: Synthetic polypeptide"

SEQ ID NO: 1932 - DNA, 336 bp, Artificial Sequence; identical to SEQ ID NO: 19
  source: /note="Description of Artificial Sequence: Synthetic polynucleotide"

SEQ ID NO: 1933 - protein, 112 aa, Homo sapiens; identical to SEQ ID NO: 20

SEQ ID NO: 1934 - DNA, 336 bp, Homo sapiens; identical to SEQ ID NO: 21

SEQ ID NO: 1935 - protein, 230 aa, Artificial Sequence; identical to SEQ ID NO: 405
  source: /note="Description of Artificial Sequence: Synthetic polypeptide"

SEQ ID NO: 1936 - DNA, 690 bp, Artificial Sequence; identical to SEQ ID NO: 406
  source: /note="Description of Artificial Sequence: Synthetic polynucleotide"

SEQ ID NO: 1937-1999 - skipped (63 entries)

SEQ ID NO: 2000 - DNA, 63 bp, Artificial Sequence
  source: /note="Description of Artificial Sequence: Synthetic oligonucleotide"
atggccctccctgtcaccgccctgctgcttccgctggctcttctgctccacgccgctcggccc

SEQ ID NO: 2001 - DNA, 72 bp, Artificial Sequence
  source: /note="Description of Artificial Sequence: Synthetic oligonucleotide"
atctacatttgggcccctctggctggtacttgcggggtcctgctgctttcactcgtgatcactctttactgt

SEQ ID NO: 2002 - DNA, 126 bp, Artificial Sequence
  source: /note="Description of Artificial Sequence: Synthetic polynucleotide"
aagcgcggtcggaagaagctgctgtacatctttaagcaacccttcatgaggcctgtgcagactactcaagaggaggacggctgttcatgccggttcccagaggaggaggaaggcggctgcgaactg

SEQ ID NO: 2003 - DNA, 336 bp, Artificial Sequence
  source: /note="Description of Artificial Sequence: Synthetic polynucleotide"
cgcgtgaaattcagccgcagcgcagatgctccagcctacaagcaggggcagaaccagctctacaacgaactcaatcttggtcggagagaggagtacgacgtgctggacaagcggagaggacgggacccagaaatgggcgggaagccgcgcagaaagaatccccaagagggcctgtacaacgagctccaaaaggataagatggcagaagcctatagcgagattggtatgaaaggggaacgcagaagaggcaaaggccacgacggactgtaccagggactcagcaccgccaccaaggacacctatgacgctcttcacatgcaggccctgccgcctcgg

SEQ ID NO: 2004 - skipped

SEQ ID NO: 2005 - protein, 8 aa, Artificial Sequence
  source: /note="Description of Artificial Sequence: Synthetic peptide"
GFDFSRYW

SEQ ID NO: 2006 - protein, 8 aa, Artificial Sequence
  source: /note="Description of Artificial Sequence: Synthetic peptide"
INLDSSTI

SEQ ID NO: 2007 - protein, 9 aa, Artificial Sequence
  source: /note="Description of Artificial Sequence: Synthetic peptide"
ARRYDAMDY

SEQ ID NO: 2008 - protein, 10 aa, Artificial Sequence
  source: /note="Description of Artificial Sequence: Synthetic peptide"
ESVDDYGISF

SEQ ID NO: 2009 - protein, 3 aa, Artificial Sequence
  source: /note="Description of Artificial Sequence: Synthetic peptide"
AAP

SEQ ID NO: 2010 - protein, 5 aa, Artificial Sequence
  source: /note="Description of Artificial Sequence: Synthetic peptide"
QQSKD

SEQ ID NO: 2011 - protein, 153 aa, Artificial Sequence
  source: /note="Description of Artificial Sequence: Synthetic polypeptide"
LKPREVKLVESGGGLVQPGGSLKLSCAASGFDFSRYWMSWVRQAPGKGLEWIGEINLDSSTINYTPSLKDKFIISRDNAKNTLYLQMSKVRSEDTALYYCARRYDAMDYWGQGTSVTVSSAKTTAPSVYPLAPVCGDTTGSSVTLGCLVKASQ

SEQ ID NO: 2012 - protein, 111 aa, Artificial Sequence
  source: /note="Description of Artificial Sequence: Synthetic polypeptide"
ASDIVLTQSPASLAVSLGQRATISCRASESVDDYGISFMNWFQQKPGQPPKLLIYAAPNQGSGVPARFSGSGSGTDFSLNIHPMEEDDTAMYFCQQSKDVRWRHQAGDQTG

SEQ ID NO: 2013-2019 - skipped (7 entries)

SEQ ID NO: 2020 - protein, 244 aa, Artificial Sequence
  source: /note="Description of Artificial Sequence: Synthetic polypeptide"
QVQLLESGAELVRPGSSVKISCKASGYAFSSYWMNWVKQRPGQGLEWIGQIYPGDGDTNYNGKFKGQATLTADKSSSTAYMQLSGLTSEDSAVYSCARKTISSVVDFYFDYWGQGTTVTGGGSGGGSGGGSGGGSELVLTQSPKFMSTSVGDRVSVTCKASQNVGTNVAWYQQKPGQSPKPLIYSATYRNSGVPDRFTGSGSGTDFTLTITNVQSKDLADYFCQYNRYPYTSFFFTKLEIKRRS

SEQ ID NO: 2021 - protein, 246 aa, Artificial Sequence
  source: /note="Description of Artificial Sequence: Synthetic polypeptide"
DIQMTQTTSSLSASLGDRVTISCRASQDISKYLNWYQQKPDGTVKLLIYHTSRLHSGVPSRFSGSGSGTDYSLTISNLEQEDIATYFCQQGNTLPYTFGGGTKLEITGSTSGSGKPGSGEGSTKGEVKLQESGPGLVAPSQSLSVTCTVSGVSLPDYGVSWIRQPPRKGLEWLGVIWGSETTYYNSALKSRLTIIKDNSKSQVFLKMNSLQTDDTAIYYCAKHYYYGGSYAMDYWGQGTSVTVSSE

SEQ ID NO: 2022 - protein, 245 aa, Artificial Sequence
  source: /note="Description of Artificial Sequence: Synthetic polypeptide"
DIQMTQTTSSLSASLGDRVTISCRASQDISKYLNWYQQKPDGTVKLLIYHTSRLHSGVPSRFSGSGSGTDYSLTISNLEQEDIATYFCQQGNTLPYTFGGGTKLEITGSTSGSGKPGSGEGSTKGEVKLQESGPGLVAPSQSLSVTCTVSGVSLPDYGVSWIRQPPRKGLEWLGVIWGSETTYYNSALKSRLTIIKDNSKSQVFLKMNSLQTDDTAIYYCAKHYYYGGSYAMDYWGQGTSVTVSS

SEQ ID NO: 2023 - protein, 464 aa, Artificial Sequence
  source: /note="Description of Artificial Sequence: Synthetic polypeptide"
QVQLLESGAELVRPGSSVKISCKASGYAFSSYWMNWVKQRPGQGLEWIGQIYPGDGDTNYNGKFKGQATLTADKSSSTAYMQLSGLTSEDSAVYSCARKTISSVVDFYFDYWGQGTTVTGGGSGGGSGGGSGGGSELVLTQSPKFMSTSVGDRVSVTCKASQNVGTNVAWYQQKPGQSPKPLIYSATYRNSGVPDRFTGSGSGTDFTLTITNVQSKDLADYFCQYNRYPYTSFFFTKLEIKRRSKIEVMYPPPYLDNEKSNGTIIHVKGKHLCPSPLFPGPSKPFWVLVVVGGVLACYSLLVTVAFIIFWVRSKRSRLLHSDYMNMTPRRPGPTRKHYQPYAPPRDFAAYRSRVKFSRSADAPAYQQGQNQLYNELNLGRREEYDVLDKRRGRDPEMGGKPRRKNPQEGLYNELQKDKMAEAYSEIGMKGERRRGKGHDGLYQGLSTATKDTYDALHMQALPPR

SEQ ID NO: 2024 - protein, 439 aa, Artificial Sequence
  source: /note="Description of Artificial Sequence: Synthetic polypeptide"
DIQMTQTTSSLSASLGDRVTISCRASQDISKYLNWYQQKPDGTVKLLIYHTSRLHSGVPSRFSGSGSGTDYSLTISNLEQEDIATYFCQQGNTLPYTFGGGTKLEITGSTSGSGKPGSGEGSTKGEVKLQESGPGLVAPSQSLSVTCTVSGVSLPDYGVSWIRQPPRKGLEWLGVIWGSETTYYNSALKSRLTIIKDNSKSQVFLKMNSLQTDDTAIYYCAKHYYYGGSYAMDYWGQGTSVTVSSESKYGPPCPPCPMFWVLVVVGGVLACYSLLVTVAFIIFWVKRGRKKLLYIFKQPFMRPVQTTQEEDGCSCRFEEEEGGCELRVKFSRSADAPAYQQGQNQLYNELNLGRREEYDVLDKRRGRDPEMGGKPRRKNPQEGLYNELQKDKMAEAYSEIGMKGERRRGKGHDGLYQGLSTATKDTYDALHMQALPPRL

SEQ ID NO: 2025 - protein, 819 aa, Artificial Sequence
  source: /note="Description of Artificial Sequence: Synthetic polypeptide"
DIQMTQTTSSLSASLGDRVTISCRASQDISKYLNWYQQKPDGTVKLLIYHTSRLHSGVPSRFSGSGSGTDYSLTISNLEQEDIATYFCQQGNTLPYTFGGGTKLEITGSTSGSGKPGSGEGSTKGEVKLQESGPGLVAPSQSLSVTCTVSGVSLPDYGVSWIRQPPRKGLEWLGVIWGSETTYYNSALKSRLTIIKDNSKSQVFLKMNSLQTDDTAIYYCAKHYYYGGSYAMDYWGQGTSVTVSSESKYGPPCPPCPMFWVLVVVGGVLACYSLLVTVAFIIFWVKRGRKKLLYIFKQPFMRPVQTTQEEDGCSCRFEEEEGGCELRVKFSRSADAPAYQQGQNQLYNELNLGRREEYDVLDKRRGRDPEMGGKPRRKNPQEGLYNELQKDKMAEAYSEIGMKGERRRGKGHDGLYQGLSTATKDTYDALHMQALPPRLEGGGEGRGSLLTCGDVEENPGPRMLLLVTSLLLCELPHPAFLLIPRKVCNGIGIGEFKDSLSINATNIKHFKNCTSISGDLHILPVAFRGDSFTHTPPLDPQELDILKTVKEITGFLLIQAWPENRTDLHAFENLEIIRGRTKQHGQFSLAVVSLNITSLGLRSLKEISDGDVIISGNKNLCYANTINWKKLFGTSGQKTKIISNRGENSCKATGQVCHALCSPEGCWGPEPRDCVSCRNVSRGRECVDKCNLLEGEPREFVENSECIQCHPECLPQAMNITCTGRGPDNCIQCAHYIDGPHCVKTCPAGVMGENNTLVWKYADAGHVCHLCHPNCTYGCTGPGLEGCPTNGPKIPSIATGMVGALLLLLVVALGIGLFM

SEQ ID NO: 2026 - protein, 467 aa, Artificial Sequence
  source: /note="Description of Artificial Sequence: Synthetic polypeptide"
DIQMTQTTSSLSASLGDRVTISCRASQDISKYLNWYQQKPDGTVKLLIYHTSRLHSGVPSRFSGSGSGTDYSLTISNLEQEDIATYFCQQGNTLPYTFGGGTKLEITGSTSGSGKPGSGEGSTKGEVKLQESGPGLVAPSQSLSVTCTVSGVSLPDYGVSWIRQPPRKGLEWLGVIWGSETTYYNSALKSRLTIIKDNSKSQVFLKMNSLQTDDTAIYYCAKHYYYGGSYAMDYWGQGTSVTVSSAAAIEVMYPPPYLDNEKSNGTIIHVKGKHLCPSPLFPGPSKPFWVLVVVGGVLACYSLLVTVAFIIFWVRSKRSRLLHSDYMNMTPRRPGPTRKHYQPYAPPRDFAAYRSRVKFSRSADAPAYQQGQNQLYNELNLGRREEYDVLDKRRGRDPEMGGKPRRKNPQEGLYNELQKDKMAEAYSEIGMKGERRRGKGHDGLYQGLSTATKDTYDALHMQALPPR

SEQ ID NO: 2027 - protein, 119 aa, Artificial Sequence
  source: /note="Description of Artificial Sequence: Synthetic polypeptide"
QVQLLESGAELVRPGSSVKISCKASGYAFSSYWMNWVKQRPGQGLEWIGQIYPGDGDTNYNGKFKGQATLTADKSSSTAYMQLSGLTSEDSAVYSCARKTISSVVDFYFDYWGQGTTVT

SEQ ID NO: 2028 - protein, 111 aa, Artificial Sequence
  source: /note="Description of Artificial Sequence: Synthetic polypeptide"
ELVLTQSPKFMSTSVGDRVSVTCKASQNVGTNVAWYQQKPGQSPKPLIYSATYRNSGVPDRFTGSGSGTDFTLTITNVQSKDLADYFYFCQYNRYPYTSGGGTKLEIKRRS

1. An isolated nucleic acid molecule encoding an anti-target CAR (chimeric antigen receptor) polypeptide, wherein the encoded anti-target CAR polypeptide comprises:
a) an extracellular ligand that binds to a target CAR polypeptide;
b) a transmembrane domain; and
c) an intracellular signaling domain comprising a stimulatory domain.

2. The isolated anti-target CAR nucleic acid molecule of claim 1, wherein the ligand comprises a cognate antigen molecule or an antibody molecule that binds to the target CAR polypeptide.

3. The isolated anti-target CAR nucleic acid molecule of claim 1, wherein the ligand comprises an anti-idiotypic antibody molecule that binds to an extracellular domain of the target CAR polypeptide.

4. The isolated anti-target CAR nucleic acid molecule of claim 1, wherein the ligand binds an antigen binding domain in the target CAR polypeptide, a hinge domain in the target CAR polypeptide, or a junction between an antigen binding domain and a hinge domain in the target CAR polypeptide.

5. The isolated anti-target CAR nucleic acid molecule of claim 1, wherein the ligand comprises a cognate antigen molecule that binds the target CAR polypeptide.

6. The isolated anti-target CAR nucleic acid molecule of claim 1, wherein the target CAR polypeptide is a CD19CAR polypeptide and the ligand comprises an anti-idiotypic antibody that binds said CD19CAR polypeptide.

7. The isolated anti-target CAR nucleic acid molecule of claim 1, wherein the target CAR polypeptide is a CD19CAR polypeptide and the ligand comprises CD19 or a fragment thereof that binds said CD19CAR polypeptide.

8. The isolated anti-target CAR nucleic acid molecule of claim 1, wherein:
(i) the target CAR polypeptide is a CD33CAR polypeptide and the ligand comprises CD33 or a fragment thereof that binds said CD33CAR polypeptide, or the ligand comprises an antibody molecule that binds said CD33CAR polypeptide;
(ii) the target CAR polypeptide is an EGFRvIIICAR polypeptide, and the ligand comprises EGFRvIII or a fragment thereof that binds said EGFRvIIICAR polypeptide, or the ligand comprises an antibody molecule that binds said EGFRvIIICAR polypeptide;
(iii) the target CAR polypeptide is a mesothelinCAR polypeptide, and the ligand comprises mesothelin or a fragment thereof that binds said mesothelinCAR polypeptide, or the ligand comprises an antibody molecule that binds said mesothelinCAR polypeptide;
(iv) the target CAR polypeptide is a BCMACAR polypeptide, and the ligand comprises BCMA or a fragment thereof that binds said BCMACAR polypeptide, or the ligand comprises an antibody molecule that binds said BCMACAR polypeptide;
(v) the target CAR polypeptide is a CD20CAR polypeptide, and the ligand comprises CD20 or a fragment thereof that binds said CD20CAR polypeptide, or the ligand comprises an antibody molecule that binds said CD20CAR polypeptide;
(vi) the target CAR polypeptide is a CD22CAR polypeptide, and the ligand comprises CD22 or a fragment thereof that binds said CD22CAR polypeptide, or the ligand comprises an antibody molecule that binds said CD22CAR polypeptide;
(vii) the target CAR polypeptide is a CD123CAR polypeptide, and the ligand comprises CD123 or a fragment thereof that binds said CD123CAR polypeptide, or the ligand comprises an antibody molecule that binds said CD123CAR polypeptide; or
(viii) the target CAR polypeptide is a CLL-1CAR polypeptide, and the ligand comprises CLL-1 or a fragment thereof that binds said CLL-1CAR polypeptide, or the ligand comprises an antibody molecule that binds said CLL-1CAR polypeptide.

9. (canceled)

10. The isolated anti-target CAR nucleic acid molecule of claim 1, wherein the target CAR comprises i) an anti-CD19 binding domain, ii) a transmembrane domain, and iii) an intracellular signaling domain.

11. A vector comprising the nucleic acid molecule encoding an anti-target CAR polypeptide of claim 1.

12. A cell comprising the nucleic acid of claim 1.

13. A method of making a cell comprising transducing a T cell, with the nucleic acid of claim 1.

14. A method of generating a population of RNA-engineered cells comprising introducing an in vitro transcribed RNA or synthetic RNA into a cell, where the RNA comprises the nucleic acid encoding an anti-target CAR polypeptide of claim 1.

15. An isolated anti-target CAR (chimeric antigen receptor) polypeptide, which comprises:
a) an extracellular ligand that binds to a target CAR polypeptide,
b) a transmembrane domain, and
c) an intracellular signaling domain comprising a stimulatory domain.

16-21. (canceled)

22. The isolated anti-target CAR polypeptide of claim 15, wherein:
(i) the target CAR polypeptide is a CD33CAR polypeptide and the ligand comprises CD33 or a fragment thereof that binds said CD33CAR polypeptide, or the ligand comprises an antibody molecule that binds said CD33CAR polypeptide;
(ii) the target CAR polypeptide is an EGFRvIIICAR polypeptide, and the ligand comprises EGFRvIII or a fragment thereof that binds said EGFRvIIICAR polypeptide, or the ligand comprises an antibody molecule that binds said EGFRvIIICAR polypeptide;
(iii) the target CAR polypeptide is a mesothelinCAR polypeptide, and the ligand comprises mesothelin or a fragment thereof that binds said mesothelinCAR polypeptide, or the ligand comprises an antibody molecule that binds said mesothelinCAR polypeptide;
(iv) the target CAR polypeptide is a BCMACAR polypeptide, and the ligand comprises BCMA or a fragment thereof that binds said BCMACAR polypeptide, or the ligand comprises an antibody molecule that binds said BCMACAR polypeptide;
(v) the target CAR polypeptide is a CD20CAR polypeptide, and the ligand comprises CD20 or a fragment thereof that binds said CD20CAR polypeptide, or the ligand comprises an antibody molecule that binds said CD20CAR polypeptide;
(vi) the target CAR polypeptide is a CD22CAR polypeptide, and the ligand comprises CD22 or a fragment thereof that binds said CD22CAR polypeptide, or the ligand comprises an antibody molecule that binds said CD22CAR polypeptide;
(vii) the target CAR polypeptide is a CD123CAR polypeptide, and the ligand comprises CD123 or a fragment thereof that binds said CD123CAR polypeptide, or the ligand comprises an antibody molecule that binds said CD123CAR polypeptide; or
(viii) the target CAR polypeptide is a CLL-1CAR polypeptide, and the ligand comprises CLL-1 or a fragment thereof that binds said CLL-1CAR polypeptide, or the ligand comprises an antibody molecule that binds said CLL-1CAR polypeptide.

23. (canceled)

24. The isolated anti-target CAR polypeptide of claim 15, wherein the target CAR polypeptide comprises i) an anti-CD19 binding domain, ii) a transmembrane domain, and iii) an intracellular signaling domain.

25. A cell comprising the anti-target CAR polypeptide of claim 15.

26. A cell engineered to express the anti-target CAR polypeptide of claim 15.

27. A method of treating a subject having, or at risk of having a disease or condition associated with expression of a target CAR, comprising administering to the subject an effective number of cells comprising the anti-target CAR polypeptide of claim 15.

28-34. (canceled)

35. A method of reducing the number of target CAR-expressing cells present in the circulation of the subject, comprising administering to the subject an effective number of cells comprising the anti-target CAR polypeptide of claim 15.

36-53. (canceled)
